(19) United States
(12) Patent Application Publication
(10) Pub. No.: US 2019/0002960 A1
(43) Pub. Date: Jan. 3, 2019

(54) GENETIC TESTING FOR ALIGNMENT-FREE PREDICTING RESISTANCE OF MICROORGANISMS AGAINST ANTIMICROBIAL AGENTS

(71) Applicant: ARES GENETICS GMBH

(72) Inventors: ANDREAS KELLER, Püttlingen (DE); SUSANNE SCHMOLKE, München (DE); CORD FRIEDRICH STÄHLER, Hirschberg an der Bergstraße (DE); CHRISTINA BACKES, Saarbrücken (DE); VALENTINA GALATA, Saarbrücken (DE)

(21) Appl. No.: 15/748,969

(22) PCT Filed: Aug. 6, 2015
(86) PCT No.: PCT/EP2015/068188

§ 371 Date: Jan. 30, 2018

(51) Int. Cl. C12Q 1/689; C12Q 1/6869

(52) U.S. Cl. CPC C12Q 1/689; C12Q 1/6869; C12Q 2600/156; C12Q 2600/106; C12Q 2535/122

(57) ABSTRACT

The present invention relates to a method of determining an infection of a patient with at least one microorganism, particularly a bacterial microorganism, potentially resistant to antimicrobial drug treatment, a method of selecting a treatment of a patient suffering from an infection with at least one microorganism, particularly bacterial microorganism, and a method of determining an antimicrobial drug, e.g. antibiotic, resistance profile for at least one microorganism, particularly bacterial microorganism, as well as computer program products used in these methods.

[0001] The present invention relates to a method of determining an infection of a patient with at least one microorganism, particularly a bacterial microorganism, potentially resistant to antimicrobial drug treatment, a method of selecting a treatment of a patient suffering from an infection with at least one microorganism, particularly bacterial microorganism, and a method of determining an antimicrobial drug, e.g. antibiotic, resistance profile for at least one microorganism, particularly bacterial microorganism, as well as computer program products used in these methods.

[0002] Antibiotic resistance is a form of drug resistance whereby a sub-population of a microorganism, e.g. a strain of a bacterial species, can survive and multiply despite exposure to an antibiotic drug. It is a serious health concern for the individual patient as well as a major public health issue. Timely treatment of a bacterial infection requires the analysis of clinical isolates obtained from patients with regard to antibiotic resistance, in order to select an efficacious therapy. Generally, for this purpose an association of the identified resistance with a certain microorganism (i.e. ID) is necessary.

[0003] Antibacterial drug resistance (ADR) represents a major health burden. According to the World Health Organization's antimicrobial resistance global report on surveillance, ADR leads to 25,000 deaths per year in Europe and 23,000 deaths per year in the US. In Europe, 2.5 million extra hospital days lead to societal cost of 1.5 billion euro. In the US, the direct cost of 2 million illnesses leads to 20 billion dollar direct cost. The overall cost is estimated to be substantially higher, reducing the gross domestic product (GDP) by up to 1.6%.

[0004] Staphylococcus is a genus of Gram-positive, facultative anaerobe bacteria of the family Staphylococcaceae, which are spherical, immobile and form grape-like clusters. The genus includes at least 40 species.

[0005] Staphylococcus aureus is the most common species of staphylococcus to cause Staph infections. It is frequently found in the human respiratory tract and on the skin. Although Staphylococcus aureus is not always pathogenic, it is a common cause of skin infections (e.g. boils), respiratory disease (e.g. sinusitis), and food poisoning as well as life-threatening diseases such as pneumonia, meningitis, osteomyelitis, endocarditis, toxic shock syndrome (TSS), bacteremia, and sepsis. Staphylococcus aureus can survive from hours to weeks, or even months, on dry environmental surfaces, depending on strain. The position of S. aureus as one of the most important opportunistic human pathogens is largely attributable to the combination of its virulence potential and its ubiquitous occurrence as a colonizer in humans, domestic animals, and livestock.

[0006] Staphylococcus aureus is the second most common overall cause of healthcare-associated infections reported to the National Healthcare Safety Network (NHSN). And current estimates suggest that 49-65% of healthcare-associated Staphylococcus aureus infections reported to NHSN are caused by methicillin-resistant Staphylococcus aureus (MRSA). MRSA is troublesome in hospitals, prisons, and nursing homes, where patients with open wounds, invasive devices, and weakened immune systems are at greater risk of nosocomial infection than the general public. MRSA began as a hospital-acquired infection, but has developed limited endemic status and is now sometimes community-acquired. Healthcare-associated MRSA (HA-MRSA) is related to prolonged length of hospital stay and is currently one of the most frequently identified pathogens in hospitals in many parts of the world. Furthermore, community acquired MRSA (CAMRSA) has demonstrated increasing trends, hence guidelines for prevention and surveillance have been issued by several healthcare officials.

[0007] In 2011 the CDC estimates 80,461 invasive MRSA infections and 11,285 related deaths occurred in the US. An unknown but much higher number of less severe infections occurred in both the community and in healthcare settings. MRSA is difficult to treat because of its resistance to most antibiotics. Treatment with vancomycin, a glycopeptide antibiotic often considered a last line of defense against MRSA, has led to the emergence of vancomycin-resistant Staphylococcus aureus (VRSA), against which few agents are effective. In addition, the use of teicoplanin, an antibiotic derived from vancomycin, has given rise to teicoplanin-resistant MRSA strains. There are other agents available to treat MRSA infection, though many have limited therapeutic benefit, primarily because of severe side effects.

[0008] In general the mechanisms for resistance of bacteria against antimicrobial treatments rely to a very substantial part on the organism's genetics. The respective genes or molecular mechanisms are either encoded in the genome of the bacteria or on plasmids that can be interchanged between different bacteria. The most common resistance mechanisms include:

[0009] 1) Efflux pumps are high-affinity reverse transport systems located in the membrane that transports the antibiotic out of the cell, e.g. resistance to tetracycline.

[0010] 2) Specific enzymes modify the antibiotic in a way that it loses its activity. In the case of streptomycin, the antibiotic is chemically modified so that it will no longer bind to the ribosome to block protein synthesis.

[0011] 3) An enzyme is produced that degrades the antibiotic, thereby inactivating it. For example, the penicillinases are a group of beta-lactamase enzymes that cleave the beta lactam ring of the penicillin molecule.

[0012] In addition, some pathogens show natural resistance against drugs. For example, an organism can lack a transport system for an antibiotic or the target of the antibiotic molecule is not present in the organism.

[0013] Resistance to methicillin and related drugs is conferred by the mecA gene, which codes for an altered penicillin-binding protein (PBP2a or PBP2′) that has a lower affinity for binding β-lactams (penicillins, cephalosporins, and carbapenems). This allows for resistance to all β-lactam antibiotics, and obviates their clinical use during MRSA infections. As such, the glycopeptide vancomycin is often deployed against MRSA.

[0014] Pathogens that are in principle susceptible to drugs can become resistant by modification of existing genetic material (e.g. spontaneous mutations for antibiotic resistance, happening in a frequency of one in about 100 mio bacteria in an infection) or the acquisition of new genetic material from another source. One example is horizontal gene transfer, a process where genetic material contained in small packets of DNA can be transferred between individual bacteria of the same species or even between different species. Horizontal gene transfer may happen by transduction, transformation or conjugation.

[0015] Generally, testing for susceptibility/resistance to antimicrobial agents is performed by culturing organisms in different concentration of these agents.

[0016] In brief, agar plates are inoculated with patient sample (e.g. urine, sputum, blood, stool) overnight. On the next day individual colonies are used for identification of organisms, either by culturing or using mass spectroscopy. Based on the identity of organisms new plates containing increasing concentration of drugs used for the treatment of these organisms are inoculated and grown for additional 12-24 hours. The lowest drug concentration which inhibits growth (minimal inhibitory concentration—MIC) is used to determine susceptibility/resistance for tested drugs. The process takes at least 2 to 3 working days during which the patient is treated empirically. Automated systems exist from several companies, e.g. Biomeriux (Vitek), Beckman Coulter (Microscan). A significant reduction of time-to-result is needed especially in patients with life-threatening disease and to overcome the widespread misuse of antibiotics.

[0017] Recent developments include PCR based test kits for fast bacterial identification (e.g. Biomerieux Biofire Tests, Curetis Unyvero Tests). With these test the detection of selected resistance loci is possible for a very limited number of drugs, but no correlation to culture based AST is given. Mass spectroscopy is increasingly used for identification of pathogens in clinical samples (e.g. Bruker Biotyper), and research is ongoing to establish methods for the detection of susceptibility/resistance against antibiotics.

[0018] The use of molecular techniques for direct detection of MRSA has become more commonplace especially for screening purposes. Resistance to methicillin is mediated via the mec operon which is part of the staphylococcal cassette chromosome mec (SCCmec). Recently PCR tests were introduced that are based on the detection of the right extremity sequence of the SCCmec in combination with S. aureus specific marker. Initial reports exist that describe culture based susceptibility reports despite detection of the presence of a resistance conferring gene.

[0019] For some drugs such it is known that at least two targets are addressed, e.g. in case of Ciprofloxacin (drug bank ID 00537; http://www.drugbank.ca/drugs/DB00537) targets include DNA Topoisomerase IV, DNA Topoisomerase II and DNA Gyrase. It can be expected that this is also the case for other drugs although the respective secondary targets have not been identified yet. In case of a common regulation, both relevant genetic sites would naturally show a co-correlation or redundancy.

[0020] It is known that drug resistance can be associated with genetic polymorphisms. This holds for viruses, where resistance testing is established clinical practice (e.g. HIV genotyping). More recently, it has been shown that resistance has also genetic causes in bacteria and even higher organisms, such as humans where tumors resistance against certain cytostatic agents can be linked to genomic mutations.

[0021] Wozniak et al. (BMC Genomics 2012, 13(Suppl 7):S23) disclose genetic determinants of drug resistance in Staphylococcus aureus based on genotype and phenotype data. Stoesser et al. disclose prediction of antimicrobial susceptibilities for Escherichia coli and Klebsiella pneumoniae isolates using whole genomic sequence data (J Antimicrob Chemother 2013; 68: 2234-2244).

[0022] Chewapreecha et al (Chewapreecha et al (2014) Comprehensive Identification of single nucleotid polymorphisms associated with beta-lactam resistance within pneumococcal mosaic genes. PLoS Genet 10(8): e1004547) used a comparable approach to identify mutations in gram-positive Streptococcus Pneumonia.

[0023] Gordon et al (Gordon et al (2014), Prediction of Staphylococcus aureus Antimicrobial Resistance by Whole-Genome Sequencing, J. Clin. Microbiol. 2014, 52(4):1182) and Dordel et al (Dordel, J., Kim, C. et al (2014). Novel Determinants of Antibiotic Resistance: Identification of Mutated Loci in Highly Methicillin-Resistant Subpopulations of Methicillin-Resistant Staphylococcus aureus. mBio, 5(2), e01000-13; doi:10.1128/mBio.01000-13) focused in their identification of new markers on already known genes.

[0024] The fast and accurate detection of infections with microorganisms, particularly microbial species, e.g. Staphylococcus aureus, and the prediction of response to anti-microbial therapy, particularly also without reference to known genes, represent a high unmet clinical need.

[0025] This need is addressed by the present invention.

### SUMMARY OF THE INVENTION

[0026] The present inventors addressed this need by carrying out whole genome sequencing of a large cohort of microorganisms, particularly bacterial microorganisms, particularly Staphylococcus aureus clinical isolates, and comparing the genetic mutation profile to resistant phenotypes of isolates and/or classical culture based antimicrobial susceptibility testing with the goal to develop a test which can be used to detect bacterial susceptibility/resistance against antimicrobial drugs using molecular testing.

[0027] The inventors performed extensive studies on the genome of bacterial species, particularly Staphylococcus species, particularly Staphylococcus aureus, either susceptible or resistant to antimicrobial, e.g. antibiotic, drugs, particularly being susceptible or resistant to methicillin and related drugs. Based on this information, it is now possible to provide a detailed analysis on the resistance pattern of Staphylococcus, particularly Staphylococcus aureus, strains based on individual mutations on a nucleotide level. This analysis involves the identification of a resistance against individual antimicrobial, e.g. antibiotic, drugs as well as clusters of them. This allows not only for the determination of a resistance to a single antimicrobial, e.g. antibiotic, drug, but also to groups of antimicrobial drugs, e.g. antibiotics such as lactam or quinolone antibiotics, or even to all relevant antibiotic drugs.

[0028] Therefore, the present invention will considerably facilitate the selection of an appropriate antimicrobial, e.g. antibiotic, drug for the treatment of a microbial, e.g. Staphylococcus, particularly Staphylococcus aureus, infection in a patient and thus will largely improve the quality of diagnosis and treatment.

[0029] The present approach is based on the use of reference free SNP calling and association testing to cover the different sources of genetic resistance as well as the different ways of how bacteria can become resistant. This way the detection of resistances is not limited to reference genomes anymore

[0030] In contrast to other works (e.g. Gordon et al, Dordel et al, see above) the identification of new markers was not focused on already known genes, but a reference free SNP calling was performed, and the annotation is based on several reference genomes.

[0031] According to a first aspect, the present invention relates to a method of determining an antimicrobial drug, e.g. antibiotic, resistance profile for a microorganism, particularly a bacterial microorganism, comprising:

[0032] obtaining or providing a first data set of gene sequences of a plurality of clinical isolates of the microorganism;

[0033] wherein at least a part of the gene sequences of the first data set are assembled;

[0034] analyzing the gene sequences of the first data set for genetis variants to obtain a third data set of genetic variants;

[0035] providing a second data set of antimicrobial drug, e.g. antibiotic, resistance and/or susceptibility of the plurality of clinical isolates of the microorganism;

[0036] correlating the third data set with the second data set and statistically analyzing the correlation; and

[0037] determining the genetic sites in the genome of the microorganism with antimicrobial drug, e.g. antibiotic, resistance.

[0038] In a second aspect the present invention discloses a diagnostic method of determining an infection of a patient with a microorganism, particularly a bacterial microorganism potentially resistant to antimicrobial drug treatment, comprising the steps of:

[0039] a) obtaining or providing a sample containing or suspected of containing a microorganism, particularly a bacterial microorganism, from the patient;

[0040] b) determining the presence of at least one genetic variant in at least one position of the microorganism, particularly the bacterial microorganism, as determined by the method of the first aspect, wherein the presence of said at least one genetic variant is indicative of an infection with an antimicrobial drug resistant microorganism in said patient.

[0041] A third aspect of the present invention relates to a method of selecting a treatment of a patient suffering from an infection with a potentially resistant microorganism, particularly bacterial microorganism, comprising the steps of:

[0042] a) obtaining or providing a sample containing or suspected of containing a microorganism, particularly a bacterial microorganism, from the patient;

[0043] b) determining the presence of at least one genetic variant in at least one position of the microorganism, particularly bacterial microorganism, as determined by the method of the first aspect, wherein the presence of said at least one genetic variant is indicative of a resistance to one or more antimicrobial drugs;

[0044] c) identifying said at least one or more antimicrobial drugs; and

[0045] d) selecting one or more antimicrobial drugs different from the ones identified in step c) and being suitable for the treatment of the infection with the microorganism, particularly the bacterial microorganism.

[0046] A fourth aspect of the present invention relates to a method of acquiring, respectively determining, an antimicrobial drug, e.g. antibiotic, resistance profile for a clinical isolate of a microorganism, particularly a bacterial microorganism, comprising:

[0047] obtaining or providing at least one gene sequence of the clinical isolate of the microorganism, particularly the bacterial microorganism; and

[0048] determining the presence of genetic variants in the at least one gene sequence of the clinical isolate of the microorganism, particularly bacterial microorganism, as determined by the method of the first aspect of the present invention.

[0049] Furthermore, a computer program product comprising computer executable instructions which, when executed, perform a method according to any one of the first to third aspects of the present invention is disclosed in a fifth aspect of the present invention.

[0050] In addition, a sixth aspect of the present invention relates to a diagnostic method of determining an infection of a patient with a Staphylococcus species, particularly Staphylococcus aureus, potentially resistant to antimicrobial drug, e.g. antibiotic, treatment, comprising the steps of:

[0051] a) obtaining or providing a sample containing or suspected of containing at least one Staphylococcus species, particularly Staphylococcus aureus, from the patient;

[0052] b) determining the presence of at least one genetic variation in at least two positions from the group of positions annotated with Nos. 1-50 with regard to the reference genomes with the genome names given in Table 1 below, wherein the presence of said at least two genetic variations is indicative of an infection with an antimicrobial drug, e.g. antibiotic, resistant Staphylococcus, particularly Staphylococcus aureus, strain in said patient, wherein for some positions more than one position in different reference genomes is annotated.

TABLE 1
List of positions with Nos. 1-50

| No. | position | reference genome | genome name |
|---|---|---|---|
| 1 | 534953 F | NC_017340.1 | 04_02981 |
| | 543821 F | NC_010079.1 | USA300_TCH1516 |
| 2 | 210528 R | NC_022222.1 | 6850 |
| | 267448 R | NC_017340.1 | 04_02981 |
| | 269814 R | NC_010079.1 | USA300_TCH1516 |
| 3 | 1362060 F | NC_017340.1 | 04_02981 |
| 4 | 1252703 R | NC_021670.1 | Bmb9393 |
| | 1520285 F | NC_017351.1 | 11819_97 |
| | 1523326 F | NC_017340.1 | 04_02981 |
| 5 | 1619285 R | NC_017340.1 | 04_02981 |
| | 1661238 R | NC_010079.1 | USA300_TCH1516 |
| 6 | 1641150 R | NC_017340.1 | 04_02981 |
| 7 | 170059 F | NC_002953.3 | MSSA476 |
| | 142263 F | NC_017337.1 | ED133 |
| 8 | 517571 F | NC_017340.1 | 04_02981 |
| | 554542 F | NC_018608.1 | 08BA02176 |
| 9 | 978538 F | NC_017340.1 | 04_02981 |
| 10 | 1434811 R | NC_017340.1 | 04_02981 |
| 11 | 953696 R | NC_022222.1 | 6850 |
| | 1010027 R | NC_010079.1 | USA300_TCH1516 |
| 12 | 208285 R | NC_017340.1 | 04_02981 |
| | 161011 R | NC_007795.1 | NCTC_8325 |
| 13 | 2179136 R | NC_017351.1 | 11819_97 |
| | 2149064 R | NC_017340.1 | 04_02981 |
| | 2107689 R | NC_018608.1 | 08BA02176 |
| 14 | 2358535 F | NC_017340.1 | 04_02981 |
| 15 | 2023012 R | NC_017340.1 | 04_02981 |
| 16 | 2777211 F | NC_007795.1 | NCTC_8325 |
| | 2779170 F | NC_017340.1 | 04_02981 |
| 17 | 1801995 R | NC_018608.1 | 08BA02176 |
| | 1790672 R | NC_017340.1 | 04_02981 |
| 18 | 976788 F | NC_017340.1 | 04_02981 |
| | 878040 F | NC_007795.1 | NCTC_8325 |
| 19 | 2101899 R | NC_021670.1 | Bmb9393 |
| | 1972149 R | NC_017340.1 | 04_02981 |
| 20 | 1875550 F | NC_022222.1 | 6850 |
| | 2006001 F | NC_010079.1 | USA300_TCH1516 |
| | 1959494 F | NC_017340.1 | 04_02981 |
| 21 | 705667 R | NC_017340.1 | 04_02981 |
| 22 | 2268723 F | NC_010079.1 | USA300_TCH1516 |
| | 2221448 F | NC_017340.1 | 04_02981 |
| 23 | 1814108 R | NC_017340.1 | 04_02981 |
| 24 | 531649 R | NC_017340.1 | 04_02981 |
| | 531398 R | NC_017351.1 | 11819_97 |
| 25 | 1754561 F | NC_017340.1 | 04_02981 |
| | 1691742 F | NC_007795.1 | NCTC_8325 |
| 26 | 1958403 R | NC_017340.1 | 04_02981 |
| | 2004910 R | NC_010079.1 | USA300_TCH1516 |
| 27 | 1242653 R | NC_022222.1 | 6850 |
| | 1294527 R | NC_010079.1 | USA300_TCH1516 |
| | 1299554 R | NC_017340.1 | 04_02981 |
| 28 | 2590222 R | NC_017340.1 | 04_02981 |
| | 2637689 R | NC_010079.1 | USA300_TCH1516 |
| 29 | 1881161 R | NC_010079.1 | USA300_TCH1516 |
| | 1871101 R | NC_021059.1 | M1 |
| | 1759861 R | NC_022222.1 | 6850 |
| | 1855493 R | NC_018608.1 | 08BA02176 |
| | 1858794 R | NC_021554.1 | CC45 |
| | 1964828 R | NC_021670.1 | Bmb9393 |
| 30 | 1050123 R | NC_007795.1 | NCTC_8325 |
| | 1147277 R | NC_017340.1 | 04_02981 |
| 31 | 2005634 F | NC_016912.1 | VC40 |
| | 2039052 F | NC_022222.1 | 6850 |
| | 2187801 F | NC_010079.1 | USA300_TCH1516 |
| 32 | 350202 F | NC_022222.1 | 6850 |
| | 402479 F | NC_017340.1 | 04_02981 |
| | 352104 F | NC_007795.1 | NCTC_8325 |
| 33 | 920768 F | NC_021059.1 | M1 |
| | 956878 F | NC_018608.1 | 08BA02176 |
| | 956978 F | NC_017340.1 | 04_02981 |
| | 858255 F | NC_007795.1 | NCTC_8325 |
| 34 | 1121847 R | NC_017340.1 | 04_02981 |
| | 1024692 R | NC_007795.1 | NCTC_8325 |
| 35 | 429303 F | NC_017340.1 | 04_02981 |
| 36 | 1812380 R | NC_010079.1 | USA300_TCH1516 |
| | 1775835 R | NC_017340.1 | 04_02981 |
| | 1714993 R | NC_007795.1 | NCTC_8325 |
| 37 | 1928346 F | NC_017340.1 | 04_02981 |
| 38 | 1388095 R | NC_022226.1 | CN1 |
| 39 | 559072 R | NC_017340.1 | 04_02981 |
| | 504007 R | NC_007795.1 | NCTC_8325 |
| 40 | 2719339 R | NC_010079.1 | USA300_TCH1516 |
| | 2668764 R | NC_017340.1 | 04_02981 |
| 41 | 1124668 F | NC_017340.1 | 04_02981 |
| | 1121585 F | NC_010079.1 | USA300_TCH1516 |
| 42 | 158073 F | NC_022226.1 | CN1 |
| | 193628 F | NC_021059.1 | M1 |
| | 138357 F | NC_022222.1 | 6850 |
| | 196480 F | NC_010079.1 | USA300_TCH1516 |
| | 189192 F | NC_017340.1 | 04_02981 |
| 43 | 1187805 F | NC_017340.1 | 04_02981 |
| | 1078815 F | NC_022113.1 | 55_2053 |
| | 1182930 F | NC_010079.1 | USA300_TCH1516 |
| 44 | 1376396 R | NC_010079.1 | USA300_TCH1516 |
| | 1323236 R | NC_022222.1 | 6850 |
| | 1315892 R | NC_022226.1 | CN1 |
| | 1379143 R | NC_017340.1 | 04_02981 |
| | 1399306 F | NC_021670.1 | Bmb9393 |
| 45 | 2398505 R | NC_017340.1 | 04_02981 |
| 46 | 2753541 F | NC_017340.1 | 04_02981 |
| | 2803165 F | NC_010079.1 | USA300_TCH1516 |
| 47 | 1415365 R | NC_017340.1 | 04_02981 |
| | 1428821 R | NC_018608.1 | 08BA02176 |
| | 1318646 R | NC_007795.1 | NCTC_8325 |
| | 1412563 R | NC_010079.1 | USA300_TCH1516 |
| | 1381147 R | NC_021059.1 | M1 |
| 48 | 1678734 R | NC_017340.1 | 04_02981 |
| | 1720315 R | NC_010079.1 | USA300_TCH1516 |
| 49 | 854815 R | NC_007795.1 | NCTC_8325 |
| | 953539 R | NC_017340.1 | 04_02981 |
| | 948900 R | NC_010079.1 | USA300_TCH1516 |
| 50 | 1675156 R | NC_017340.1 | 04_02981 |

[0053] A seventh aspect of the present invention relates to a method of selecting a treatment of a patient suffering from an infection with a potentially resistant Staphylococcus, particularly Staphylococcus aureus, strain, comprising the steps of:

[0054] a) obtaining or providing a sample containing or suspected of containing at least one Staphylococcus, particularly Staphylococcus aureus, strain from the patient;

[0055] b) determining the presence of at least one genetic variation in at least two positions from the group of positions annotated with Nos. 1-50 with regard to the reference genomes with the genome names given in Table 1, wherein the presence of said at least two genetic variations is indicative of a resistance to one or more antimicrobial, e.g. antibiotic, drugs, wherein for some positions more than one position in different reference genomes is annotated;

[0056] c) identifying said at least one or more antimicrobial, e.g. antibiotic, drugs; and

[0057] d) selecting one or more antimicrobial, e.g. antibiotic, drugs different from the ones identified in step c) and being suitable for the treatment of a Staphylococcus, particularly Staphylococcus aureus, infection.

[0058] Further, an eighth aspect of the present invention relates to a diagnostic method of determining an infection of a patient with a Staphylococcus species, particularly Staphylococcus aureus, potentially resistant to antimicrobial drug, e.g. antibiotic, treatment, comprising the steps of:

[0059] a) obtaining or providing a sample containing or suspected of containing at least one Staphylococcus, particularly Staphylococcus aureus, strain from the patient;

[0060] b) determining the presence of at least one genetic variation in at least two positions from the group of positions annotated with Nos. 1-50 with regard to the reference genomes with the genome names given in Tables 3a and/or 3b below, wherein the presence of said at least two genetic variations is indicative of an infection with an antimicrobial drug, e.g. antibiotic, resistant Staphylococcus, particularly Staphylococcus aureus, strain in said patient, wherein for some positions more than one position in different reference genomes is annotated.

TABLE 3a
List of positions with Nos. 1-50

| No. | position | reference genome | genome name |
|---|---|---|---|
| 1 | 1958403 R | NC_017340.1 | 04_02981 |
| | 2004910 R | NC_010079.1 | USA300_TCH1516 |
| 2 | 1641150 R | NC_017340.1 | 04_02981 |
| 3 | 978538 F | NC_017340.1 | 04_02981 |
| 4 | 705667 R | NC_017340.1 | 04_02981 |
| 5 | 1434811 R | NC_017340.1 | 04_02981 |
| 6 | 953696 R | NC_022222.1 | 6850 |
| | 1010027 R | NC_010079.1 | USA300_TCH1516 |
| 7 | 2101899 R | NC_021670.1 | Bmb9393 |
| | 1972149 R | NC_017340.1 | 04_02981 |
| 8 | 208285 R | NC_017340.1 | 04_02981 |
| | 161011 R | NC_007795.1 | NCTC_8325 |
| 9 | 2179136 R | NC_017351.1 | 11819_97 |
| | 2149064 R | NC_017340.1 | 04_02981 |
| | 2107689 R | NC_018608.1 | 08BA02176 |
| 10 | 2358535 F | NC_017340.1 | 04_02981 |
| 11 | 2023012 R | NC_017340.1 | 04_02981 |
| 12 | 2777211 F | NC_007795.1 | NCTC_8325 |
| | 2779170 F | NC_017340.1 | 04_02981 |
| 13 | 1801995 R | NC_018608.1 | 08BA02176 |
| | 1790672 R | NC_017340.1 | 04_02981 |
| 14 | 1754561 F | NC_017340.1 | 04_02981 |
| | 1691742 F | NC_007795.1 | NCTC_8325 |
| 15 | 1362060 F | NC_017340.1 | 04_02981 |
| 16 | 1242653 R | NC_022222.1 | 6850 |
| | 1294527 R | NC_010079.1 | USA300_TCH1516 |
| | 1299554 R | NC_017340.1 | 04_02981 |
| 17 | 1252703 R | NC_021670.1 | Bmb9393 |
| | 1520285 F | NC_017351.1 | 11819_97 |
| | 1523326 F | NC_017340.1 | 04_02981 |
| 18 | 1619285 R | NC_017340.1 | 04_02981 |
| | 1661238 R | NC_010079.1 | USA300_TCH1516 |
| 19 | 1875550 F | NC_022222.1 | 6850 |
| | 2006001 F | NC_010079.1 | USA300_TCH1516 |
| | 1959494 F | NC_017340.1 | 04_02981 |
| 20 | 976788 F | NC_017340.1 | 04_02981 |
| | 878040 F | NC_007795.1 | NCTC_8325 |
| 21 | 2590222 R | NC_017340.1 | 04_02981 |
| | 2637689 R | NC_010079.1 | USA300_TCH1516 |
| 22 | 210528 R | NC_022222.1 | 6850 |
| | 267448 R | NC_017340.1 | 04_02981 |
| | 269814 R | NC_010079.1 | USA300_TCH1516 |
| 23 | 1814108 R | NC_017340.1 | 04_02981 |
| 24 | 170059 F | NC_002953.3 | MSSA476 |
| | 142263 F | NC_017337.1 | ED133 |
| 25 | 534953 F | NC_017340.1 | 04_02981 |
| | 543821 F | NC_010079.1 | USA300_TCH1516 |
| 26 | 517571 F | NC_017340.1 | 04_02981 |
| | 554542 F | NC_018608.1 | 08BA02176 |
| 27 | 531649 R | NC_017340.1 | 04_02981 |
| | 531398 R | NC_017351.1 | 11819_97 |
| 28 | 1050123 R | NC_007795.1 | NCTC_8325 |
| | 1147277 R | NC_017340.1 | 04_02981 |
| 29 | 1881161 R | NC_010079.1 | USA300_TCH1516 |
| | 1871101 R | NC_021059.1 | M1 |
| | 1759861 R | NC_022222.1 | 6850 |
| | 1855493 R | NC_018608.1 | 08BA02176 |
| | 1858794 R | NC_021554.1 | CC45 |
| | 1964828 R | NC_021670.1 | Bmb9393 |
| 30 | 2268723 F | NC_010079.1 | USA300_TCH1516 |
| | 2221448 F | NC_017340.1 | 04_02981 |
| 31 | 920768 F | NC_021059.1 | M1 |
| | 956878 F | NC_018608.1 | 08BA02176 |
| | 956978 F | NC_017340.1 | 04_02981 |
| | 858255 F | NC_007795.1 | NCTC_8325 |
| 32 | 2005634 F | NC_016912.1 | VC40 |
| | 2039052 F | NC_022222.1 | 6850 |
| | 2187801 F | NC_010079.1 | USA300_TCH1516 |
| 33 | 429303 F | NC_017340.1 | 04_02981 |
| 34 | 350202 F | NC_022222.1 | 6850 |
| | 402479 F | NC_017340.1 | 04_02981 |
| | 352104 F | NC_007795.1 | NCTC_8325 |
| 35 | 158073 F | NC_022226.1 | CN1 |
| | 193628 F | NC_021059.1 | M1 |
| | 138357 F | NC_022222.1 | 6850 |
| | 196480 F | NC_010079.1 | USA300_TCH1516 |
| | 189192 F | NC_017340.1 | 04_02981 |
| 36 | 1121847 R | NC_017340.1 | 04_02981 |
| | 1024692 R | NC_007795.1 | NCTC_8325 |
| 37 | 2719339 R | NC_010079.1 | USA300_TCH1516 |
| | 2668764 R | NC_017340.1 | 04_02981 |
| 38 | 1388095 R | NC_022226.1 | CN1 |
| 39 | 1415365 R | NC_017340.1 | 04_02981 |
| | 1428821 R | NC_018608.1 | 08BA02176 |
| | 1318646 R | NC_007795.1 | NCTC_8325 |
| | 1412563 R | NC_010079.1 | USA300_TCH1516 |
| | 1381147 R | NC_021059.1 | M1 |
| 40 | 1678734 R | NC_017340.1 | 04_02981 |
| | 1720315 R | NC_010079.1 | USA300_TCH1516 |
| 41 | 1928346 F | NC_017340.1 | 04_02981 |
| 42 | 1376396 R | NC_010079.1 | USA300_TCH1516 |
| | 1323236 R | NC_022222.1 | 6850 |
| | 1315892 R | NC_022226.1 | CN1 |
| | 1379143 R | NC_017340.1 | 04_02981 |
| | 1399306 F | NC_021670.1 | Bmb9393 |
| 43 | 1338943 R | NC_017340.1 | 04_02981 |
| 44 | 1124668 F | NC_017340.1 | 04_02981 |
| | 1121585 F | NC_010079.1 | USA300_TCH1516 |
| 45 | 559072 R | NC_017340.1 | 04_02981 |
| | 504007 R | NC_007795.1 | NCTC_8325 |
| 46 | 1675156 R | NC_017340.1 | 04_02981 |
| 47 | 1187805 F | NC_017340.1 | 04_02981 |
| | 1078815 F | NC_022113.1 | 55_2053 |
| | 1182930 F | NC_010079.1 | USA300_TCH1516 |
| 48 | 1356138 F | NC_017340.1 | 04_02981 |
| 49 | 854815 R | NC_007795.1 | NCTC_8325 |
| | 953539 R | NC_017340.1 | 04_02981 |
| | 948900 R | NC_010079.1 | USA300_TCH1516 |
| 50 | 2459738 F | NC_017340.1 | 04_02981 |
| | 2364478 F | NC_022222.1 | 6850 |

TABLE 3b
List of positions with Nos. 1-50

| No. | position | reference genome | genome name |
|---|---|---|---|
| 1 | 1958403 R | NC_017340.1 | 04_02981 |
| | 2004910 R | NC_010079.1 | USA300_TCH1516 |
| 2 | 1641150 R | NC_017340.1 | 04_02981 |
| 3 | 978538 F | NC_017340.1 | 04_02981 |
| 4 | 705667 R | NC_017340.1 | 04_02981 |
| 5 | 1434811 R | NC_017340.1 | 04_02981 |
| 6 | 953696 R | NC_022222.1 | 6850 |
| | 1010027 R | NC_010079.1 | USA300_TCH1516 |
| 7 | 2101899 R | NC_021670.1 | Bmb9393 |
| | 1972149 R | NC_017340.1 | 04_02981 |
| 8 | 208285 R | NC_017340.1 | 04_02981 |
| | 161011 R | NC_007795.1 | NCTC_8325 |
| 9 | 2179136 R | NC_017351.1 | 11819_97 |
| | 2149064 R | NC_017340.1 | 04_02981 |
| | 2107689 R | NC_018608.1 | 08BA02176 |
| 10 | 2358535 F | NC_017340.1 | 04_02981 |
| 11 | 2023012 R | NC_017340.1 | 04_02981 |
| 12 | 2777211 F | NC_007795.1 | NCTC_8325 |
| | 2779170 F | NC_017340.1 | 04_02981 |
| 13 | 1801995 R | NC_018608.1 | 08BA02176 |
| | 1790672 R | NC_017340.1 | 04_02981 |
| 14 | 1754561 F | NC_017340.1 | 04_02981 |
| | 1691742 F | NC_007795.1 | NCTC_8325 |
| 15 | 1362060 F | NC_017340.1 | 04_02981 |
| 16 | 1242653 R | NC_022222.1 | 6850 |
| | 1294527 R | NC_010079.1 | USA300_TCH1516 |
| | 1299554 R | NC_017340.1 | 04_02981 |
| 17 | 1252703 R | NC_021670.1 | Bmb9393 |
| | 1520285 F | NC_017351.1 | 11819_97 |
| | 1523326 F | NC_017340.1 | 04_02981 |
| 18 | 1619285 R | NC_017340.1 | 04_02981 |
| | 1661238 R | NC_010079.1 | USA300_TCH1516 |
| 19 | 1875550 F | NC_022222.1 | 6850 |
| | 2006001 F | NC_010079.1 | USA300_TCH1516 |
| | 1959494 F | NC_017340.1 | 04_02981 |
| 20 | 976788 F | NC_017340.1 | 04_02981 |
| | 878040 F | NC_007795.1 | NCTC_8325 |
| 21 | 2590222 R | NC_017340.1 | 04_02981 |
| | 2637689 R | NC_010079.1 | USA300_TCH1516 |
| 22 | 210528 R | NC_022222.1 | 6850 |
| | 267448 R | NC_017340.1 | 04_02981 |
| | 269814 R | NC_010079.1 | USA300_TCH1516 |
| 23 | 1814108 R | NC_017340.1 | 04_02981 |
| 24 | 170059 F | NC_002953.3 | MSSA476 |
| | 142263 F | NC_017337.1 | ED133 |
| 25 | 534953 F | NC_017340.1 | 04_02981 |
| | 543821 F | NC_010079.1 | USA300_TCH1516 |
| 26 | 517571 F | NC_017340.1 | 04_02981 |
| | 554542 F | NC_018608.1 | 08BA02176 |
| 27 | 531649 R | NC_017340.1 | 04_02981 |
| | 531398 R | NC_017351.1 | 11819_97 |
| 28 | 1050123 R | NC_007795.1 | NCTC_8325 |
| | 1147277 R | NC_017340.1 | 04_02981 |
| 29 | 1881161 R | NC_010079.1 | USA300_TCH1516 |
| | 1871101 R | NC_021059.1 | M1 |
| | 1759861 R | NC_022222.1 | 6850 |
| | 1855493 R | NC_018608.1 | 08BA02176 |
| | 1858794 R | NC_021554.1 | CC45 |
| | 1964828 R | NC_021670.1 | Bmb9393 |
| 30 | 2268723 F | NC_010079.1 | USA300_TCH1516 |
| | 2221448 F | NC_017340.1 | 04_02981 |
| 31 | 920768 F | NC_021059.1 | M1 |
| | 956878 F | NC_018608.1 | 08BA02176 |
| | 956978 F | NC_017340.1 | 04_02981 |
| | 858255 F | NC_007795.1 | NCTC_8325 |
| 32 | 2005634 F | NC_016912.1 | VC40 |
| | 2039052 F | NC_022222.1 | 6850 |
| | 2187801 F | NC_010079.1 | USA300_TCH1516 |
| 33 | 429303 F | NC_017340.1 | 04_02981 |
| 34 | 350202 F | NC_022222.1 | 6850 |
| | 402479 F | NC_017340.1 | 04_02981 |
| | 352104 F | NC_007795.1 | NCTC_8325 |
| 35 | 158073 F | NC_022226.1 | CN1 |
| | 193628 F | NC_021059.1 | M1 |
| | 138357 F | NC_022222.1 | 6850 |
| | 196480 F | NC_010079.1 | USA300_TCH1516 |
| | 189192 F | NC_017340.1 | 04_02981 |
| 36 | 1121847 R | NC_017340.1 | 04_02981 |
| | 1024692 R | NC_007795.1 | NCTC_8325 |
| 37 | 2719339 R | NC_010079.1 | USA300_TCH1516 |
| | 2668764 R | NC_017340.1 | 04_02981 |
| 38 | 1388095 R | NC_022226.1 | CN1 |
| 39 | 1415365 R | NC_017340.1 | 04_02981 |
| | 1428821 R | NC_018608.1 | 08BA02176 |
| | 1318646 R | NC_007795.1 | NCTC_8325 |
| | 1412563 R | NC_010079.1 | USA300_TCH1516 |
| | 1381147 R | NC_021059.1 | M1 |
| 40 | 1678734 R | NC_017340.1 | 04_02981 |
| | 1720315 R | NC_010079.1 | USA300_TCH1516 |
| 41 | 1928346 F | NC_017340.1 | 04_02981 |
| 42 | 1376396 R | NC_010079.1 | USA300_TCH1516 |
| | 1323236 R | NC_022222.1 | 6850 |
| | 1315892 R | NC_022226.1 | CN1 |
| | 1379143 R | NC_017340.1 | 04_02981 |
| | 1399306 F | NC_021670.1 | Bmb9393 |
| 43 | 1124668 F | NC_017340.1 | 04_02981 |
| | 1121585 F | NC_010079.1 | USA300_TCH1516 |
| 44 | 559072 R | NC_017340.1 | 04_02981 |
| | 504007 R | NC_007795.1 | NCTC_8325 |
| 45 | 1675156 R | NC_017340.1 | 04_02981 |
| 46 | 1187805 F | NC_017340.1 | 04_02981 |
| | 1078815 F | NC_022113.1 | 55_2053 |
| | 1182930 F | NC_010079.1 | USA300_TCH1516 |
| 47 | 1356138 F | NC_017340.1 | 04_02981 |
| 48 | 854815 R | NC_007795.1 | NCTC_8325 |
| | 953539 R | NC_017340.1 | 04_02981 |
| | 948900 R | NC_010079.1 | USA300_TCH1516 |
| 49 | 2459738 F | NC_017340.1 | 04_02981 |
| | 2364478 F | NC_022222.1 | 6850 |
| 50 | 1812380 R | NC_010079.1 | USA300_TCH1516 |
| | 1775835 R | NC_017340.1 | 04_02981 |
| | 1714993 R | NC_007795.1 | NCTC_8325 |

[0061] A ninth aspect of the present invention relates to a method of selecting a treatment of a patient suffering from an infection with a potentially resistant Staphylococcus, particularly Staphylococcus aureus, strain, comprising the steps of:

[0062] a) obtaining or providing a sample containing or suspected of containing at least one Staphylococcus, particularly Staphylococcus aureus, strain from the patient;

[0063] b) determining the presence of at least one genetic variation in at least two positions from the group of positions annotated with Nos. 1-50 with regard to the reference genomes with the genome names given in Tables 3a and/or 3b, wherein the presence of said at least two genetic variations is indicative of a resistance to one or more antimicrobial, e.g. antibiotic, drugs, wherein for some positions more than one position in different reference genomes is annotated;

[0064] c) identifying said at least one or more antimicrobial, e.g. antibiotic, drugs; and

[0065] d) selecting one or more antimicrobial, e.g. antibiotic, drugs different from the ones identified in step c) and being suitable for the treatment of a Staphylococcus, particularly Staphylococcus aureus, infection.

[0066] Further aspects and embodiments of the invention are disclosed in the dependent claims and can be taken from the following description, figures and examples, without being limited thereto.

### FIGURES

[0067] The enclosed drawings should illustrate embodiments of the present invention and convey a further understanding thereof. In connection with the description they serve as explanation of concepts and principles of the invention. Other embodiments and many of the stated advantages can be derived in relation to the drawings. The elements of the drawings are not necessarily to scale towards each other. Identical, functionally equivalent and acting equal features and components are denoted in the figures of the drawings with the same reference numbers, unless noted otherwise.

[0068] FIG. 1 shows schematically a read-out concept for a diagnostic test according to a method of the present invention.

### DETAILED DESCRIPTION OF THE PRESENT INVENTION

[0069] Definitions

[0070] Unless defined otherwise, technical and scientific terms used herein have the same meaning as commonly understood by one of ordinary skill in the art to which this invention belongs.

[0071] An “antimicrobial drug” in the present invention refers to a group of drugs that includes antibiotics, antifungals, antiprotozoals, and antivirals. According to certain embodiments, the antimicrobial drug is an antibiotic.

[0072] The term “nucleic acid molecule” refers to a polynucleotide molecule having a defined sequence. It comprises DNA molecules, RNA molecules, nucleotide analog molecules and combinations and derivatives thereof, such as DNA molecules or RNA molecules with incorporated nucleotide analogs or cDNA.

[0073] The term “nucleic acid sequence information” relates to an information which can be derived from the sequence of a nucleic acid molecule, such as the sequence itself or a variation in the sequence as compared to a reference sequence.

[0074] In general, the term “genetic variation relates to a position in the genome where at least two random organisms of a species are different. The term “genetic variation” particularly relates to a variation in the sequence as compared to one or more reference sequences, e.g. single nucleotide polymorphisms (SNPs), mutations, copy number variations, etc. Such reference sequences can be sequences determined in a predominant wild type organism or a reference organism, e.g. a defined and known bacterial strain or substrain, e.g. of a bacterial species like Staphylococcus aureus, which can have large variations in gene content among closely related strains. A genetic variation is for example a deletion of one or multiple nucleotides, an insertion of one or multiple nucleotides, or substitution of one or multiple nucleotides, duplication of one or a sequence of multiple nucleotides, translocation of one or a sequence of multiple nucleotides, and, in particular, a single nucleotide polymorphism (SNP).

[0075] For clearly identifying the variations, these can then be annotated to one or more reference sequences, e.g. a defined and known bacterial strain or substrain, but also a pangenome of a microorganism like Staphylococcus aureus. The pan-genome generally includes the genes present in all strains of the microorganism, e.g. the bacterial species, as well as genes present in two or more strains, and genes specific to single strains.

[0076] According to certain embodiments, genetic variations were obtained with alignment-free methods, e.g. for detecting single base exchanges, for example based on contigs that were constructed by assemblies. For example, reads obtained from sequencing can be assembled to contigs and the contigs can be compared to each other.

[0077] In the context of the present invention a “sample” is a sample which comprises at least one nucleic acid molecule from a bacterial microorganism. Examples for samples are: cells, tissue, body fluids, biopsy specimens, blood, urine, saliva, sputum, plasma, serum, cell culture supernatant, swab sample and others. According to certain embodiments, the sample is a patient sample (clinical isolate).

[0078] New and highly efficient methods of sequencing nucleic acids referred to as next generation sequencing have opened the possibility of large scale genomic analysis. The term “next generation sequencing” or “high throughput sequencing” refers to high-throughput sequencing technologies that parallelize the sequencing process, producing thousands or millions of sequences at once. Examples include Massively Parallel Signature Sequencing (MPSS), Polony sequencing, 454 pyrosequencing, Illumina (Solexa) sequencing, SOLiD sequencing, Ion semiconductor sequencing, DNA nanoball sequencing, Helioscope™ single molecule sequencing, Single Molecule SMRT™ sequencing, Single Molecule real time (RNAP) sequencing, Nanopore DNA sequencing, Sequencing By Hybridization, Amplicon Sequencing, GnuBio.

[0079] Within the present description the term “microorganism” comprises the term microbe. The type of microorganism is not particularly restricted, unless noted otherwise or obvious, and, for example, comprises bacteria, viruses, fungi, microscopic algae and protozoa, as well as combinations thereof. According to certain aspects, it refers to one or more Staphylococcus aureus strains.

[0080] A reference to a microorganism or microorganisms in the present description comprises a reference to one microorganism as well a plurality of microorganisms, e.g. two, three, four, five, six or more microorganisms.

[0081] A vertebrate within the present invention refers to animals having a vertebrae, which includes mammals—including humans, birds, reptiles, amphibians and fishes. The present invention thus is not only suitable for human medicine, but also for veterinary medicine.

[0082] According to certain embodiments, the patient in the present methods is a vertebrate, more preferably a mammal and most preferred a human patient.

[0083] Before the invention is described in exemplary detail, it is to be understood that this invention is not limited to the particular component parts of the process steps of the methods described herein as such methods may vary. It is also to be understood that the terminology used herein is for purposes of describing particular embodiments only, and is not intended to be limiting. It must be noted that, as used in the specification and the appended claims, the singular forms “a,” “an” and “the” include singular and/or plural referents unless the context clearly dictates otherwise. For example, the term “a” as used herein can be understood as one single entity or in the meaning of “one or more” entities. It is also to be understood that plural forms include singular and/or plural referents unless the context clearly dictates otherwise. It is moreover to be understood that, in case parameter ranges are given which are delimited by numeric values, the ranges are deemed to include these limitation values.

[0084] Regarding the dosage of the antimicrobial, e.g. antibiotic, drugs, it is referred to the established principles of pharmacology in human and veterinary medicine. For example, Forth, Henschler, Rummel “Allgemeine und spezielle Pharmakologie und Toxikologie”, 9th edition, 2005 might be used as a guideline. Regarding the formulation of a ready-to-use medicament, reference is made to “Remington, The Science and Practice of Pharmacy”, 22nd edition, 2013.

[0085] Assembling of a gene sequence can be carried out by any known method and is not particularly limited.

[0086] According to a first aspect, the present invention relates to a method of determining an antimicrobial drug, e.g. antibiotic, resistance profile for a microorganism, particularly a bacterial microorganism, comprising:

[0087] obtaining or providing a first data set of gene sequences of a plurality of clinical isolates of the microorganism; wherein at least a part of the gene sequences of the first data set are assembled;

[0088] analyzing the gene sequences of the first data set for genetic variants to obtain a third data set of genetic variants;

[0089] providing a second data set of antimicrobial drug, e.g. antibiotic, resistance and/or susceptibility of the plurality of clinical isolates of the microorganism;

[0090] correlating the third data set with the second data set and statistically analyzing the correlation; and

[0091] determining the genetic sites in the genome of the microorganism with antimicrobial drug, e.g. antibiotic, resistance.

[0092] In this method, as well as the other methods of the invention, the first data set of gene sequences of a plurality of clinical isolates can be provided or obtained in any way, preferably non-invasive, and can be e.g. provided from in vitro samples.

[0093] According to certain embodiments, the obtaining or providing of gene sequences of a plurality of clinical isolates in this method—as well as the other methods of the invention—can comprise the following:

[0094] A sample of a vertebrate, e.g. a human, e.g. is provided or obtained and nucleic acid sequences, e.g. DNA or RNA sequences, are recorded by a known method for recording nucleic acid, which is not particularly limited. For example, nucleic acid can be recorded by a sequencing method, wherein any sequencing method is appropriate, particularly sequencing methods wherein a multitude of sample components, as e.g. in a blood sample, can be analyzed for nucleic acids and/or nucleis acid fragments and/or parts thereof contained therein in a short period of time, including the nucleic acids and/or nucleic acid fragments and/or parts thereof of at least one microorganism of interest, particularly a bacterial microorganism, e.g. of the species Staphylococcus aureus. For example, sequencing can be carried out using polymerase chain reaction (PCR), particularly multiplex PCR, or high throughput sequencing or next generation sequencing, preferably using high-throughput sequencing. For sequencing, preferably an in vitro sample is used.

[0095] The data obtained by the sequencing can be in any format, and can then be used to identify the nucleic acids of the microorganism, e.g. of Staphylococcus aureus species, to be identified, by known methods, e.g. fingerprinting methods, comparing genomes and/or aligning to at least one, or more, genomes of one or more species of the microorganism of interest, i.e. a reference genome, etc., forming a third data set of aligned genes for a microorganism, particularly Staphylococcus aureus—discarding additional data from other sources, e.g. the vertebrate. According to certain embodiments, at least a part of the gene sequences of the first data set are assembled, wherein assembly can be carried out by any known method and is not particularly limited. According to certain embodiments, the data of the gene sequences are essentially all or all assembled. However, also data from genomes of known species, e.g. from bacterial species like Staphylococcus aureus, that are already known, e.g. from databases like at the NCBI, can be used in the first data set.

[0096] For some organisms, it might be useful in genome-wide association studies to reference the points of interest, e.g. mutations, to one constant reference for enhanced standardization. In case of the human with a high consistency of the genome and 99% identical sequences among individuals this is easy and represents the standard, as corresponding reference genomes are available in databases.

[0097] In case of organisms that trigger infectious diseases (e.g. bacteria and viruses) this is much more difficult, though, and particularly also genetic variations that are not on genes, particularly known genes, can be missed when aligning sequence data to a reference genome. One possibility to overcome this is to fall back on a virtual pan-genome which contains all sequences of a certain genus or to perform reference free variation calling. A further possibility is the analysis of all available references, which is much more complex. Therein all n references from a database (e.g. RefSeq) are extracted and compared with the newly sequenced bacterial genomes k. After this, matrices (% of mapped reads, % of covered genome) can be applied and the data can be compared to several reference genomes. In such a case, n×k complete alignments are carried out. Having a big number of references, stable results can be obtained, as is the case for e.g. Staphylococcus aureus. Further, due to the high division rate under stress/an exogenous signal a jump in the mutation rate can be observed.

[0098] According to the invention, the gene sequence of the first data set are assembled, at least in part, with known methods, e.g. by de-novo assembly or mapping assembly. The sequence assembly is not particularly limited, and any known genome assembler can be used, e.g. based on Sanger, 454, Solexa, Illumina, SOLid technologies, etc., as well as hybrids/mixtures thereof.

[0099] According to certain embodiments, the data of nucleic acids of different origin than the microorganism of interest, e.g. a bacterial microorganism like Staphylococcus aureus, can be removed after the nucleic acids of interest are identified, e.g. by filtering the data out. Such data can e.g. include nucleic acids of a patient, e.g. the vertebrate, e.g. human, and/or other microorganisms, etc. This can be done by e.g. computational subtraction, as developed by Meyerson et al. 2002. For this, also aligning to the genome of the vertebrate, etc., is possible. For aligning, several alignment-tools are available. This way the original data amount from the sample can be drastically reduced.

[0100] After such removal of “excess” data, obtaining the third data set can be carried out for the microorganism, e.g. Staphylococcus aureus, as described above.

[0101] Using these techniques, genetic variations in the gene sequences of the microorganism of interest, e.g. a bacterial microorganism like Staphylococcus aureus, can be obtained for various species.

[0102] When testing these same species for antimicrobial drug, e.g. antibiotic, susceptibility of a number of antimicrobial drugs, e.g. antibiotics, e.g. using standard culturing methods on dishes with antimicrobial drug, e.g. antibiotic, intake, as e.g. described below, the results of these antimicrobial drug, e.g. antibiotic, susceptibility tests can then be cross-referenced/correlated with the genetic variations in the genome of the respective microorganism, e.g. Staphylococcus aureus. Using several, e.g. 50 or more than 50, 100 or more than 100, 200 or more than 200, 400 or more than 400, 800 or more than 800, or 900 or more than 900 different isofates of the same or different species of a microorganism, e.g. of Staphylococcus aureus, statistical analysis can be carried out on the obtained cross-referenced data between genetic variations and antimicrobial drug, e.g. antibiotic, susceptibility for these microorganisms, using known methods.

[0103] Regarding culturing methods, samples of microorganisms can be e.g. cultured overnight. On the next day individual colonies can be used for identification of organisms, either by culturing or using mass spectroscopy. Based on the identity of organisms new plates containing increasing concentration of antibiotics used for the treatment of these organisms are inoculated and grown for additional 12-24 hours. The lowest drug concentration which inhibits growth (minimal inhibitory concentration—MIC) can be used to determine susceptibility/resistance for tested antibiotics.

[0104] Also, resistance testing can be carried out by determining e.g. known resistance genes in the different isolates, e.g. in case of methicillin resistant Staphylococcus aureus (MRSA) and methicillin susceptible Staphylococcus aureus (MSSA), but also regarding resistances of Staphylococcus to one or more (different) drugs, e.g. antibiotics. For determining resistances, respectively susceptibility, the data from culturing methods and/or from determining known resistance genes, as well as data obtained in different ways, e.g. based on mass spectrometry (possibly also in connection with culturing) can be used.

[0105] Correlation of the genetic variations with antimicrobial drug, e.g. antibiotic, resistance can be carried out in a usual way and is not particularly limited. For example, resistances can be correlated to genetic variances in the whole genome of the respective microorganism or only parts thereof, for example only coding parts of the genome. In some cases even only genetic variations in genes, e.g. certain genes, or certain mutations, e.g. SNPs, in genes can be determined. After correlation, statistical analysis can be carried out.

[0106] According to certain embodiments, the genetic variants in the gene sequences of the first data set are single nucleotide polymorphisms (SNPs).

[0107] According to certain embodiments, the data of the first data set, particularly SNPs, can be filtered prior to a possible annotation to a pan-genome and/or reference genome(s) and the correlation with the resistance/susceptibility data.

[0108] For example, to reduce the number of similar annotations they can be filtered and aggregated by one or more of the following:
[0109] Only annotations for which the considered SNP lies on a protein can be kept and the further data discarded
[0110] Only annotations which do not contain “hypothetical proteins” can be kept
[0111] Annotations can be sorted by SNP identification number (ID) and gene product
[0112] For a unique pair of SNP IDs and gene products only the first annotation can be kept

[0113] Also, according to certain embodiments, the following SNPs can be excluded:
[0114] SNPs without any annotation or SNPs whose all annotations contain flag “synonymous”, so that only SNPs with at least one non-synonymous annotation, e.g. a non-synonymous coding, are considered
[0115] Constant SNPs, i.e. with the same value for all samples
[0116] Almost constant SNPs: SNPs whose most frequent value has a frequency 95%, i.e. min. 95% of all samples have the same SNP value
[0117] SNPs with a missing value (“−”) for more than 10% of samples can also be removed

[0118] According to certain embodiments, the SNPs are detected alignment-free. This way also SNPs can be found that are not found in one or more certain reference genomes. For example, the assembled gene sequences can be compared to each other, as described above. Nevertheless, as noted above, it is also possible to include known gene sequences of microorganisms of e.g. the same species, e.g. Staphylococcus species, particularly Staphylococcus aureus, that are e.g. deposited for the public, e.g. at the NCBI, and use also these data for finding genetic variations.

[0119] According to certain embodiments, the SNPs are annotated to a pan-genome of the microorganism and/or annotated to one or more reference genomes of the microorganism, e.g. a Staphylococcus species, particularly Staphylococcus aureus. For example, according to certain embodiments the microorganism used in the above method is a Staphylococcus species, particularly Staphylococcus aureus, and the antimicrobial drug is methicillin, and/or one or more of the antibiotics described below. For such embodiments, the 50 genetic variations with the highest statistical probability (particularly using 49 finished S. aureus genomes from NCBI including the chromosome and available plasmids and 995 S. aureus de novo assemblies which have an assembly) determined according to the present method obtained are the ones given in Table 1. In Table 1, the position of the genetic variation (named “position”; with R being reverse direction and F being forward direction) are given for each variation (given with consecutive numbers 1-50) with reference to one or more known reference genomes from the NCBI (with the NCBI number given in the column “reference genome” and the genome name given in the column “genome name”). The reference genomes are attached to this application as sequence listing.

[0120] The reference genomes used in Table 1 for annotation thereby were obtained from the following Staphylococcus aureus strains and are as follows: NC_{'}017340, NC_010079, NC_022222, NC_021670, NC_017351, NC_002953, NC_017337, NC_018608, NC_007795, NC_021059, NC_021554, NC_016912, NC_022226, and NC_022113, given in the following in the same order in more detail:

http://www.genome.jp/dbget-bin/www_bget?refseq+NC_017340
LOCUS NC_017340 2821452 bp DNA circular CON 15-JUL-2015

| | |
|---|---|
| DEFINITION | Staphylococcus aureus 04-02981, complete genome. |
| ACCESSION | NC_017340 |
| VERSION | NC_017340.1 GI: 387149188 |
| DBLINK | BioProject: PRJNA224116 |
| | BioSample: SAMN02603764 |
| | Assembly: GCF_000025145.1 |
| KEYWORDS | RefSeq. |
| SOURCE | Staphylococcus aureus 04-02981 |
| ORGANISM | Staphylococcus aureus 04-02981 |
| | Bacteria; Firmicutes; Bacilli; Bacillales; |
| | Staphylococcus. |
| REFERENCE | 1 (bases 1 to 2821452) |
| AUTHORS | Nubel, U., Dordel, J., Kurt, K., Strommenger, B., |
| | Westh, H., Shukla, S. K., Zemlickova, H., Leblois, |
| | R., Wirth, T., Jombart, T., Balloux, F. and Witte, W. |
| TITLE | A timescale for evolution, population expansion, |
| | and spatial spread of an emerging clone of |
| | methicillin-resistant Staphylococcus aureus |
| JOURNAL | PLoS Pathog. 6 (4), E1000855 (2010) |
| PUBMED | 20386717 |
| REMARK | Publication Status: Online-Only |
| REFERENCE | 2 (bases 1 to 2821452) |
| AUTHORS | Nuebel, U., Dordel, J., Kurt, K., Strommenger, B., |
| | Westh, H., Shukla, S. K., Zemlickova, H., Leblois, |
| | R., Wirth, T., Jombart, T., Balloux, F. and Witte, W. |
| TITLE | Direct Submission |
| JOURNAL | Submitted (05-NOV-2010) Nosocomial Infections, |
| | Robert Koch Institute, Burgstr. 37, Wernigerode |
| | 38855, Germany |
| REMARK | Sequence update by submitter |
| REFERENCE | 3 (bases 1 to 2821452) |
| AUTHORS | Nuebel, U., Dordel, J., Kurt, K., Strommenger, B., |
| | Westh, H., Shukla, S. K., Zemlickova, H., Leblois, |
| | R., Wirth, T., Jombart, T., Balloux, F. and Witte, W. |
| TITLE | Direct Submission |
| JOURNAL | Submitted (22-DEC-2009) Nosocomial Infections, |
| | Robert Koch Institute, Burgstr. 37, Wernigerode |
| | 38855, Germany |

http://www.genome.jp/dbget-bin/www_bget?refseq+NC_010079
LOCUS NC_010079 2872915 bp DNA circular CON 15-JUL-2015

| | |
|---|---|
| DEFINITION | Staphylococcus aureus subsp. aureus |
| | USA300 TCH1516, complete genome. |
| ACCESSION | NC_010079 |
| VERSION | NC_010079.1 GI: 161508266 |
| DBLINK | BioProject: PRJNA224116 |
| | BioSample: SAMN00253845 |
| | Assembly: GCF_000017085.1 |
| KEYWORDS | RefSeq. |
| SOURCE | Staphylococcus aureus subsp. aureus |
| | USA300_TCH1516 |
| ORGANISM | Staphylococcus aureus subsp. aureus |
| | USA300_TCH1516 |
| | Bacteria; Firmicutes; Bacilli; Bacillales; |
| | Staphylococcus. |
| REFERENCE | 1 (bases 1 to 2872915) |
| AUTHORS | Highlander, S. K., Hulten, K. G., Qin, X., Jiang, H., |
| | Yerrapragada, S., Mason, E. O. Jr., Shang, Y., |
| | Williams, T. M., Fortunov, R. M., Liu, Y., Igboeli, |
| | O., Petrosino, J., Tirumalai, M., Uzman, A., Fox, |
| | G.E., Cardenas, A. M., Muzny, D. M., Hemphill, |
| | L., Ding, Y., Dugan, S., Blyth, P. R., Buhay, C. J., |
| | Dinh, H. H., Hawes, A. C., Holder, M., Kovar, C. |
| | L., Lee, S. L., Liu, W., Nazareth, L. V., Wang, Q., |
| | Zhou, J., Kaplan, S. L. and Weinstock, G. M. |
| TITLE | Subtle genetic changes enhance virulence of |
| | methicillin resistant and sensitive Staphylococcus |
| | aureus |
| JOURNAL | BMC Microbiol. 7, 99 (2007) |
| PUBMED | 17986343 |
| REMARK | Publication Status: Online-Only |
| REFERENCE | 2 (bases 1 to 2872915) |
| AUTHORS | Muzny, D., Qin, X., Buhay, C., Dugan-Rocha, S., |
| | Ding, Y., Chen, G., Hawes, A., Holder, M., Jhangiani, |
| | S., Johnson, A., Khan, Z., Li, Z., Liu, W., Liu, X., |
| | Perez, L., Shen, H., Wang, Q., Watt, J., Xi, L., |
| | Xin, Y., Zhou, J., Deng, J., Jiang, H., Liu, Y., |
| | Qu, J., Song, X.-Z., Zhang, L., Villasana, D., |
| | Johnson, A., Liu, J., Liyanage, D., Lorensuhewa, |
| | L., Robinson, T., Song, A., Song, B.-B., Dinh, |
| | H., Thornton, R., Coyle, M., Francisco, L., Jackson, |
| | L., Javaid, M., Korchina, V., Kovar, C., Mata, R., |
| | Mathew, T., Ngo, R., Nguyen, L., Nguyen, N., |
| | Okwuonu, G., Ongeri, F., Pham, C., Simmons, |
| | D., Wilczek-Boney, K., Hale, W., Jakkamsetti, A., |
| | Pham, P., Ruth, R., SanLucas, F., Warren, J., Zhang, |
| | J., Zhao, Z., Zhou, C., Zhu, D., Lee, S., Bess, C., |
| | Blankenburg, K., Forbes, L., Fu, Q., Gubbala, S., |
| | Hirani, K., Jayaseelan, J.C., Lara, F., Munidasa, M., |
| | Palculict, T., Patil, S., Pu, L.-L., Saada, N., Tang, L., |
| | Weissenberger, G., Zhu, Y., Hemphill, L., Shang, Y., |
| | Youmans, B., Ayvaz, T., Ross, M., Santibanez, J., |
| | Aqrawi, P., Gross, S., Joshi, V., Fowler, G., |
| | Nazareth, L., Reid, J., Worley, K., Petrosino, J., |
| | Highlander, S. and Gibbs, R. |
| TITLE | Direct Submission |
| JOURNAL | Submitted (20-JUN-2007) Molecular Virology and |
| | Microbiology and the Human Genome Sequencing |
| | Center, Baylor College of Medicine, One Baylor Plaza, |
| | Houston, TX 77030, USA |

http://www.genome.jp/dbget-bin/www_bget?refseq+NC_022222
LOCUS NC_022222 2736560 bp DNA circular CON 17-FEB-2015

| | |
|---|---|
| DEFINITION | Staphylococcus aureus subsp. aureus 6850, |
| | complete genome. |
| ACCESSION | NC_022222 |
| VERSION | NC_022222.1 GI: 537441500 |
| DBLINK | BioProject: PRJNA224116 |
| | BioSample: SAMN02604264 |
| | Assembly: GCF_000462955.1 |
| KEYWORDS | RefSeq. |
| SOURCE | Staphylococcus aureus subsp. aureus 6850 |
| ORGANISM | Staphylococcus aureus subsp. aureus 6850 |
| | Bacteria; Firmicutes; Bacilli; Bacillales; |
| | Staphylococcus. |
| REFERENCE | 1 (bases 1 to 2736560) |
| AUTHORS | Fraunholz, M., Bernhardt, J., Schuldes, J., |
| | Daniel, R., Hecker, M. and Sinha, B. |
| TITLE | Complete Genome Sequence of Staphylococcus aureus |
| | 6850, a Highly Cytotoxic and Clinically Virulent |
| | Methicillin-Sensitive Strain with Distant |
| | Relatedness to Prototype Strains |
| JOURNAL | Genome Announc 1 (5) (2013) |
| PUBMED | 24072870 |
| REMARK | Publication Status: Online-Only |
| REFERENCE | 2 (bases 1 to 2736560) |
| AUTHORS | Fraunholz, M. J., Bernhardt, J., Hecker, M., |
| | Schuldes, J., Daniel, R. and Sinha, B. |
| TITLE | Direct Submission |
| JOURNAL | Submitted (26-AUG-2013) Department of |
| | Microbiology, University of Wuerzburg, Am Hubland, |
| | Wuerzburg 97074, Germany |

http://www.genome.jp/dbget-bin/www_bget?refseq+NC_021670
LOCUS NC_021670 2980548 bp DNA circular CON 07-FEB-2015

| | |
|---|---|
| DEFINITION | Staphylococcus aureus Bmb9393, complete genome. |
| ACCESSION | NC_021670 |
| VERSION | NC_021670.1 GI: 521210823 |
| DBLINK | BioProject: PRJNA224116 |
| | BioSample: SAMN02603524 |
| | Assembly: GCF_000418345.1 |
| KEYWORDS | RefSeq. |
| SOURCE | Staphylococcus aureus Bmb9393 |
| ORGANISM | Staphylococcus aureus Bmb9393 |
| | Bacteria; Firmicutes; Bacilli; Bacillales; |
| | Staphylococcus. |
| REFERENCE | 1 (bases 1 to 2980548) |
| AUTHORS | Costa, M. O., Beltrame, C. O., Ferreira, F. A., |
| | Botelho, A. M., Lima, N. C., Souza, R. C., de |
| | Almeida, L. G., Vasconcelos, A. T., Nicolas, M. |
| | F. and Figueiredo, A. M. |
| TITLE | Complete Genome Sequence of a Variant of the |
| | Methicillin-Resistant Staphylococcus aureus ST239 |
| | Lineage, Strain BMB9393, Displaying Superior |
| | Ability To Accumulate ica-Independent Biofilm |
| JOURNAL | Genome Announc 1 (4) (2013) |
| PUBMED | 23929475 |
| REMARK | Publication Status: Online-Only |
| REFERENCE | 2 (bases 1 to 2980548) |
| AUTHORS | Costa, M. O. C., Beltrame, C. O., Lima, N. C. B., |
| | Almeida, L. G. P., Vasconcelos, A. T. R., Ferreira, |
| | F. A., Nicolas, M. F. and Figueiredo, A. M. S. |
| TITLE | Direct Submission |
| JOURNAL | Submitted (15-APR-2013) Labinfo, LNCC- |
| | Laboratorio Nacional de Computacao Cientifica, Rua |
| | Getulio Vargas 333, Petropolis, RJ 25651070, Brazil |

http://www.genome.jp/dbget-bin/www_bget?refseq+NC_017351
LOCUS NC_017351 2846546 bp DNA circular CON 07-FEB-2015

| | |
|---|---|
| DEFINITION | Staphylococcus aureus subsp. aureus 11819-97, |
| | complete genome. |
| ACCESSION | NC_017351 |
| VERSION | NC_017351.1 GI: 385780298 |
| DBLINK | BioProject: PRJNA224116 |
| | BioSample: SAMN02603886 |
| | Assembly: GCF_000239235.1 |
| KEYWORDS | RefSeq. |
| SOURCE | Staphylococcus aureus subsp. aureus 11819-97 |
| ORGANISM | Staphylococcus aureus subsp. aureus 11819-97 |
| | Bacteria; Firmicutes; Bacilli; Bacillales; |
| | Staphylococcus. |
| REFERENCE | 1 (bases 1 to 2846546) |
| AUTHORS | Stegger, M., Price, L. B., Larsen, A. R., |
| | Gillece, J. D., Waters, A. E., Skov, R. and Andersen, P. S. |
| TITLE | Genome sequence of Staphylococcus aureus strain |
| | 11819-97, an ST80-IV European community- |
| | acquired methicillin-resistant isolate |
| JOURNAL | J. Bacteriol. 194 (6), 1625-1626 (2012) |
| PUBMED | 22374956 |
| REFERENCE | 2 (bases 1 to 2846546) |
| AUTHORS | Stegger, M., Price, L. B., Larsen, A. R., |
| | Gillece, J. D., Waters, A. E., Skov, R. and Andersen, P. S. |
| TITLE | Direct Submission |
| JOURNAL | Submitted (13-DEC-2011) Department of |
| | Microbiological Surveillance and Research, Statens |
| | Serum Institut, Oerestads Boulevard 5, 2300 Copenhagen |
| | S, 5 Artillerivej, Denmark |

http://www.genome.jp/dbget-bin/www_bget?refseq+NC_002953
LOCUS NC_002953 2799802 bp DNA circular CON 07-FEB-2015

| | |
|---|---|
| DEFINITION | Staphylococcus aureus strain MSSA476, complete |
| | genome. |
| ACCESSION | NC_002953 |
| VERSION | NC_002953.3 GI: 49484912 |
| DBLINK | BioProject: PRJNA224116 |
| | Assembly: GCF_000011525.1 |
| KEYWORDS | RefSeq; complete genome. |
| SOURCE | Staphylococcus aureus subsp. aureus MSSA476 |
| ORGANISM | Staphylococcus aureus subsp. aureus MSSA476 |
| | Bacteria; Firmicutes; Bacilli; Bacillales; |
| | Staphylococcus. |
| REFERENCE | 1 (bases 1 to 2799802) |
| AUTHORS | Holden, M. T., Feil, E. J., Lindsay, J. A., Peacock, |
| | S. J., Day, N. P., Enright, M. C., Foster, T. J., Moore, |
| | C. E., Hurst, L., Atkin, R., Barron, A., Bason, N., |
| | Bentley, S. D., Chillingworth, C., Chillingworth, T., |
| | Churcher, C., Clark, L., Corton, C., Cronin, A., |
| | Doggett, J., Dowd, L., Feltwell, T., Hance, Z., Harris, |
| | B., Hauser, H., Holroyd, S., Jagels, K., James, K. D., |
| | Lennard, N., Line, A., Mayes, R., Moule, S., Mungall, |
| | K., Ormond, D., Quail, M. A., Rabbinowitsch, E., |
| | Rutherford, K., Sanders, M., Sharp, S.,Simmonds, |
| | M., Stevens, K., Whitehead, S., Barrell, B. G., Spratt, |
| | B. G. and Parkhill, J. |
| TITLE | Complete genomes of two clinical Staphylococcus |
| | aureus strains: evidence for the rapid evolution of |
| | virulence and drug resistance |
| JOURNAL | Proc. Natl. Acad. Sci. U.S.A. 101 (26), 9786-9791 |
| | (2004) |
| PUBMED | 15213324 |
| REFERENCE | 2 (bases 1 to 2799802) |
| AUTHORS | Holden, M. T. G. |
| TITLE | Direct Submission |
| JOURNAL | Submitted (23-JUN-2004) Submitted on behalf of |
| | the Pathogen Sequencing Unit, Sanger Institute, |
| | Wellcome Trust Genome Campus, Hinxton, |
| | Cambridge CB10 1SA, E-mail: mh3@sanger.ac.uk |

http://www.genome.jp/dbget-bin/www_bget?refseq+NC_017337
LOCUS NC_017337 2832478 bp DNA circular CON 07-FEB-2015

| | |
|---|---|
| DEFINITION | Staphylococcus aureus subsp. aureus ED133, |
| | complete genome. |
| ACCESSION | NC_017337 |
| VERSION | NC_017337.1 GI: 384546269 |
| DBLINK | BioProject: PRJNA224116 |
| | BioSample: SAMN02604166 |
| | Assembly: GCF_000210315.1 |
| KEYWORDS | RefSeq. |
| SOURCE | Staphylococcus aureus subsp. aureus ED133 |
| ORGANISM | Staphylococcus aureus subsp. aureus ED133 |
| | Bacteria; Firmicutes; Bacilli; Bacillales; |
| | Staphylococcus. |
| REFERENCE | 1 (bases 1 to 2832478) |
| AUTHORS | Guinane, C. M., Ben Zakour, N. L., Tormo-Mas, |
| | M. A., Weinert, L. A., Lowder, B. V., Cartwright, |
| | R. A., Smyth, D. S., Smyth, C. J., Lindsay, J. A., |
| | Gould, K. A., Witney, A., Hinds, J., Bollback, J. P., |
| | Rambaut, A., Penades, J. R. and Fitzgerald, J. R. |
| TITLE | Evolutionary genomics of Staphylococcus aureus |
| | reveals insights into the origin and molecular basis |
| | of ruminant host adaptation |
| JOURNAL | Genome Biol Evol 2, 454-466 (2010) |
| PUBMED | 20624747 |
| REMARK | Publication Status: Online-Only |
| REFERENCE | 2 (bases 1 to 2832478) |
| AUTHORS | Guinane, C. M., Ben Zakour, N. L., Tormo-Mas, M. |
| | A., Weinert, L. A., Lowder, B. V., Cartwright, R. A., |
| | Smyth, D. S., Smyth, C. J., Lindsay, J., Gould, K. A., |
| | Witney, A., Hinds, J., Bollback, J. P., Rambaut, A., |
| | Penades, J. and Fitzgerald, J. R. |
| TITLE | Direct Submission |
| JOURNAL | Submitted (29-MAR-2010) The Roslin Institute and |
| | Centre for Infectious Diseases, Royal (Dick) School |
| | of Veterinary Studies, University of Edinburgh, The |
| | Chancellor's Building, New Royal Infirmary, 49 |
| | Little France Crescent, Edinburgh EH16 4SB, |
| | United Kingdom |

http://www.genome.jp/dbget-bin/www_bget?refseq+NC_018608
LOCUS NC_018608 2782313 bp DNA circular CON 07-FEB-2015

| | |
|---|---|
| DEFINITION | Staphylococcus aureus 08BA02176, complete |
| | genome. |
| ACCESSION | NC_018608 |
| VERSION | NC_018608.1 GI: 404477334 |
| DBLINK | BioProject: PRJNA224116 |
| | BioSample: 5AMN02603722 |
| | Assembly: GCF_000296595.1 |
| KEYWORDS | RefSeq. |
| SOURCE | Staphylococcus aureus 08BA02176 |
| ORGANISM | Staphylococcus aureus 08BA02176 |
| | Bacteria; Firmicutes; Bacilli; Bacillales; |
| | Staphylococcus. |
| REFERENCE | 1 (bases 1 to 2782313) |
| AUTHORS | Golding, G. R., Bryden, L., Levett, P. N., McDonald, |
| | R. R., Wong, A., Graham, M. R., Tyler, S., Van |
| | Domselaar, G., Mabon, P., Kent, H., Butaye, P., |
| | Smith, T. C., Kadlec, K., Schwarz, S., Weese, S. J. |
| | and Mulvey, M. R. |
| TITLE | whole-genome sequence of livestock-associated |
| | st398 methicillin-resistant staphylococcus aureus |
| | Isolated from Humans in Canada |
| JOURNAL | J. Bacteriol. 194 (23), 6627-6628 (2012) |
| PUBMED | 23144384 |
| REFERENCE | 2 (bases 1 to 2782313) |
| AUTHORS | Golding, G. R., Bryden, L., Levett, P. N., McDonald, |
| | R. R., Wong, A., Graham, M. R., Tyler, S., Van |
| | Domselaar, G., Mabon, P., Kent, H., Butaye, P., |
| | Smith, T. C., Kadlec, K., Schwarz, S., Weese, S. J. |
| | and Mulvey, M. R. |
| TITLE | Direct Submission |
| JOURNAL | Submitted (31-AUG-2012) Antimicrobial Resistance |
| | and Nosocomial Infections, Public Health Agency of |
| | Canada, National Microbiology Laboratory, 1015 |
| | Arlington Street, Winnipeg, Manitoba R3E 3R2, |
| | Canada |

http://www.genome.jp/dbget-bin/www_bget?refseq+NC_007795
LOCUS NC_007795 2821361 bp DNA circular CON 16-DEC-2014

| | |
|---|---|
| DEFINITION | Staphylococcus aureus subsp. aureus NCTC 8325 |
| | chromosome, complete genome. |
| ACCESSION | NC_007795 |
| VERSION | NC_007795.1 GI: 88193823 |
| DBLINK | BioProject: PRJNA57795 |
| KEYWORDS | RefSeq. |
| SOURCE | Staphylococcus aureus subsp. aureus NCTC 8325 |
| ORGANISM | Staphylococcus aureus subsp. aureus NCTC 8325 |
| | Bacteria; Firmicutes; Bacilli; Bacillales; |
| | Staphylococcus. |
| REFERENCE | 1 (bases 1 to 2821361) |
| AUTHORS | Gillaspy, A. F., Worrell, V., Orvis, J., Roe, B. A., |
| | Dyer, D. W. and Iandolo, J. J. |
| TITLE | The Staphylococcus aureus NCTC8325 Genome |
| JOURNAL | (in) Fischetti, V., Novick, R., Ferretti, J., |
| | Portnoy, D. and Rood, J. (Eds.); GRAM POSITIVE |
| | PATHOGENS; ASM Press (2006) |
| REFERENCE | 2 (bases 1 to 2821361) |
| CONSRTM | NCBI Genome Project |
| TITLE | Direct Submission |
| JOURNAL | Submitted (18-FEB-2006) National Center for Bio- |
| | technology Information, NIH, Bethesda, MD 20894, |
| | USA |
| REFERENCE | 3 (bases 1 to 2821361) |
| AUTHORS | Gillaspy, A. F., Worrell, V., Orvis, J., Roe, B. A., |
| | Dyer, D. W. and Iandolo, J. J. |
| TITLE | Direct Submission |
| JOURNAL | Submitted (27-JAN-2006) Microbiology and |
| | Immunology, The University of Oklahoma Health |
| | Sciences Center, 940 Stanton L. Young Boulevard, |
| | Oklahoma City, OK 73104, USA |

http://www.genome.jp/dbget-bin/www_bget?refseq+NC_021059

| | |
|---|---|
| LOCUS | NC_021059 2864125 bp DNA circular CON Mar. 1, 2015 |
| DEFINITION | Staphylococcus aureus M1, complete genome. |
| ACCESSION | NC_021059 |
| VERSION | NC_021059.1 GI: 479328021 |
| DBLINK | BioProject: PRJNA224116 |
| | Assembly: GCF_000367745.1 |
| KEYWORDS | RefSeq; complete genome. |
| SOURCE | Staphylococcus aureus M1 |
| ORGANISM | Staphylococcus aureus M1 |
| | Bacteria; Firmicutes; Bacilli; Bacillales; Staphylococcus. |
| REFERENCE | 1 |
| AUTHORS | Larner-Svensson,H., Worning,P., Bartels,M.D., |
| | Hestbjerg Hansen,L., Boye,K. and Westh,H. |
| TITLE | Complete Genome Sequence of Staphylococcus aureus |
| | Strain M1, a Unique t024-ST8-IVa Danish Methicillin-Resistant |
| | S. aureus Clone |
| JOURNAL | Genome Announc 1 (3) (2013) |
| PUBMED | 23792746 |
| REMARK | Publication Status: Online-Only |
| REFERENCE | 2 (bases 1 to 2864125) |
| AUTHORS | Worning,P. |
| TITLE | Direct Submission |
| JOURNAL | Submitted (Mar. 18, 2013) Dept. of Clinical Micro- |
| | biology, Hvidovre Hospital, Kettegaard Alle 30, DK-2650, |
| | DENMARK |

http://www.genome.jp/dbget-bin/www_bget?refseq+NC_021554

| | |
|---|---|
| LOCUS | NC_021554 2850503 bp DNA circular CON Feb. 7, 2015 |
| DEFINITION | Staphylococcus aureus CA-347, complete genome. |
| ACCESSION | NC_021554 |
| VERSION | NC_021554.1 GI: 514064966 |
| DBLINK | BioProject: PRJNA224116 |
| | BioSample: SAMN02603909 |
| | Assembly: GCF_000412775.1 |
| KEYWORDS | RefSeq. |
| SOURCE | Staphylococcus aureus CA-347 |
| ORGANISM | Staphylococcus aureus CA-347 |
| | Bacteria; Firmicutes; Bacilli; Bacillales; Staphylococcus. |
| REFERENCE | 1 (bases 1 to 2850503) |
| AUTHORS | Stegger,M., Driebe,E.M., Roe,C., Lemmer,D., Bowers,J.R., |
| | Engelthaler,D.M., Keim,P. and Andersen,P.S. |
| TITLE | Genome Sequence of Staphylococcus aureus Strain |
| | CA-347, a USA600 Methicillin-Resistant Isolate |
| JOURNAL | Genome Announc 1 (4) (2013) |
| PUBMED | 23887918 |
| REMARK | Publication Status: Online-Only |
| REFERENCE | 2 (bases 1 to 2850503) |
| AUTHORS | Stegger,M., Driebe,E.M., Roe,C., Lemmer,D., |
| | Engelthaler,D.M., Keim,P. and Andersen,P.S. |
| TITLE | Direct Submission |
| JOURNAL | Submitted (Jun. 10, 2013) CPHCP, TGen North, 3051 |
| | W. Shamrell Blvd., Ste. 106, Flagstaff, AZ 86001, USA |

http://www.genome.jp/dbget-bin/www_bget?refseq+NC_016912

| | |
|---|---|
| LOCUS | NC_016912 2692570 bp DNA circular CON Feb. 7, 2015 |
| DEFINITION | Staphylococcus aureus subsp. aureus VC40, complete genome. |
| ACCESSION | NC_016912 |
| VERSION | NC_016912.1 GI: 379013365 |
| DBLINK | BioProject: PRJNA224116 |
| | BioSample: SAMN02603393 |
| | Assembly: GCF_000245495.1 |
| KEYWORDS | RefSeq. |
| SOURCE | Staphylococcus aureus subsp. aureus VC40 |
| ORGANISM | Staphylococcus aureus subsp. aureus VC40 |
| | Bacteria; Firmicutes; Bacilli; Bacillales; Staphylococcus. |
| REFERENCE | 1 (bases 1 to 2692570) |
| AUTHORS | Sass,P., Berscheid,A., Jansen,A., Oedenkoven,M., |
| | Szekat,C., Strittmatter,A., Gottschalk,G. and Bierbaum,G. |
| TITLE | Genome sequence of Staphylococcus aureus VC40, a |
| | vancomycin- and daptomycin-resistant strain, to study the |
| | genetics of development of resistance to currently applied |
| | last-resort antibiotics |
| JOURNAL | J. Bacteriol. 194 (8), 2107-2108 (2012) |
| PUBMED | 22461548 |
| REFERENCE | 2 (bases 1 to 2692570) |
| AUTHORS | Sass,P., Berscheid,A., Jansen,A., Oedenkoven,M., |
| | Szekat,C., Strittmatter,A., Gottschalk,G. and Bierbaum,G. |
| TITLE | Direct Submission |
| JOURNAL | Submitted (Aug. 25, 2011) Institute of Medical Mi- |
| | crobiology, Immunology and Parasitology, University of Bonn, |
| | Sigmund-Freud-Str. 25, Bonn 53105, Germany |

http://www.genome.jp/dbget-bin/www_bget?refseq+NC_022226

| | |
|---|---|
| LOCUS | NC_022226 2751266 bp DNA circular CON Mar. 1, 2015 |
| DEFINITION | Staphylococcus aureus subsp. aureus CN1, complete |
| | genome. |
| ACCESSION | NC_022226 |
| VERSION | NC_022226.1 GI: 537459744 |
| DBLINK | BioProject: PRJNA224116 |
| | BioSample: SAMN02603420 |
| | Assembly: GCF_000463055.1 |
| KEYWORDS | RefSeq. |
| SOURCE | Staphylococcus aureus subsp. aureus CN1 |
| ORGANISM | Staphylococcus aureus subsp. aureus CN1 |
| | Bacteria; Firmicutes; Bacilli; Bacillales; Staphylococcus. |
| REFERENCE | 1 (bases 1 to 2751266) |
| AUTHORS | Chen,Y., Chatterjee,S.S., Porcella,S.F., Yu,Y.S. |
| | and Otto,M. |
| TITLE | Complete genome sequence of a Panton-Valentine |
| | leukocidin-negative community-associated methicillin- |
| | resistant Staphylococcus aureus strain of sequence type 72 |
| | from Korea |
| JOURNAL | PLoS ONE 8 (8), E72803 (2013) |
| PUBMED | 23977354 |
| REMARK | Publication Status: Online-Only |
| REFERENCE | 2 (bases 1 to 2751266) |
| AUTHORS | Otto,M. and Porcella,S.F. |
| TITLE | Direct Submission |
| JOURNAL | Submitted (Dec. 4, 2012) Laboratory of Human Bac- |
| | terial Pathogenesis, NIAID/NIH, 9000 Rockville Pike, |
| | Bethesda, MD 20892, USA |

http://www.genome.jp/dbget-bin/www_bget?refseq+NC_022113

| | |
|---|---|
| LOCUS | NC_022113 2756919 bp DNA circular CON Feb. 7, 2015 |
| DEFINITION | Staphylococcus aureus subsp. aureus 55/2053, |
| | complete genome. |
| ACCESSION | NC_022113 NZ_ACJR01000000-NZ_ACJR01000094 |
| | NZ_GG700533-NZ GG700558 |
| VERSION | NC_022113.1 GI: 532358222 |
| DBLINK | BioProject: PRJNA224116 |
| | BioSample: SAMN00103091 |
| | Assembly: GCF_000160335.2 |
| KEYWORDS | RefSeq. |
| SOURCE | Staphylococcus aureus subsp. aureus 55/2053 |
| ORGANISM | Staphylococcus aureus subsp. aureus 55/2053 |
| | Bacteria; Firmicutes; Bacilli; Bacillales; Staphylococcus. |
| REFERENCE | 1 (bases 1 to 2756919) |
| AUTHORS | Feldgarden,M., Robinson,A., Wong,A., Smyth,D., |
| | Young,S.K., Zeng,Q., Gargeya,S., Fitzgerald,M., Haas,B., |
| | Abouelleil,A., Alvarado,L., Arachchi,H.M., Berlin,A., |
| | Brown,A., Chapman,S.B., Chen, Z., Dunbar,C., Gearin,G., |
| | Goldberg,J., Griggs,A., Gujja,S., Heiman,D., Howarth,C., |
| | Larson,L., Lui,A., MacDonald,P.J.P., Montmayeur,A., |
| | Murphy,C., Neiman,D., Pearson,M., Priest,M., Roberts,A., |
| | Saif,S., Shea,T., Sisk,P., Stolte,C., Sykes,S., Wortman,J., |
| | Nusbaum,C. and Birren,B. |
| CONSRTM | The Broad Institute Genome Sequencing Platform |
| TITLE | The Genome Sequence of Staphylococcus aureus |
| | strain 55-2053 |
| JOURNAL | Unpublished |
| REFERENCE | 2 (bases 1 to 2756919) |
| AUTHORS | Feldgarden,M., Robinson,A., Wong,A., Smyth,D., |
| | Young,S.K., Zeng,Q., Gargeya,S., Fitzgerald,M., Haas,B., |
| | Abouelleil,A., Alvarado,L., Arachchi,H.M., Berlin,A., |
| | Brown,A., Chapman,S.B., Chen, Z., Dunbar,C., Gearin,G., |
| | Goldberg,J., Griggs,A., Gujja,S., Heiman,D., Howarth,C., |
| | Larson,L., Lui,A., MacDonald,P.J.P., Montmayeur,A., |
| | Murphy,C., Neiman,D., Pearson,M., Priest,M., Roberts,A., |
| | Saif,S., Shea,T., Sisk,P., Stolte,C., Sykes,S., Wortman,J., |
| | Nusbaum,C. and Birren,B. |
| CONSRTM | The Broad Institute Genome Sequencing Platform |
| TITLE | Direct Submission |
| JOURNAL | Submitted (May 10, 2013) Broad Institute of MIT |
| | and Harvard, 7 Cambridge Center, Cambridge, MA 02142, USA |
| REFERENCE | 3 (bases 1 to 2756919) |
| AUTHORS | Feldgarden,M., Robinson,A., Wong,A., Smyth,D., |
| | Young,S.K., Zeng,Q., Koehrsen,M., Godfrey,P., Alvarado,L., |
| | Berlin,A., Borenstein,D., Chen,Z., Engels,R., Freedman,E., |
| | Gellesch,M., Goldberg,J., Griggs,A., Gujja,S., Heiman,D., |
| | Hepburn,T., Howarth,C., Jen,D., Larson,L., Lewis,B., |
| | Mehta,T., Park,D., Pearson,M., Roberts,A., Saif,S., Shea,T., |
| | Shenoy,N., Sisk,P., Stolte,C., Sykes,S., Walk,T., White,J., |
| | Yandava,C., Wirth,D.F., Galagan,J., Nusbaum,C. and Birren,B. |
| CONSRTM | The Broad Institute Genome Sequencing Platform |
| TITLE | Direct Submission |
| JOURNAL | Submitted (Apr. 2, 2009) Broad Institute of MIT |
| | and Harvard, 7 Cambridge Center, Cambridge, MA 02142, USA |

[0121] In addition, the genetic variations can also be annotated to a pan-genome constructed from the genomes used, and can be numbered using consecutive numbers. In the present method, the construction of a pan-genome is not particularly limited and can be done using known methods.

[0122] However, other suitable reference genomes (e.g. used in the Examples, but also for other microorganisms) can be found at publicly available data bases like at the NCBI.

[0123] Statistical analysis of the correlation of the gene mutations with antimicrobial drug, e.g. antibiotic, resistance is not particularly limited and can be carried out, depending on e.g. the amount of data, in different ways, for example using analysis of variance (ANOVA), Student's t-test or Fisher's exact test, for example with a sample size n of 50, 100, 200, 300, 400, 800 or 900, and a level of significance (α-error-level) of e.g. 0.05 or smaller, e.g. 0.05, preferably 0.01 or smaller. A statistical value can be obtained for each genetic variation and/or each position in the genome as well as for all antibiotics tested, a group of antibiotics or a single antibiotic. The obtained p-values can also be adapted for statistical errors, if needed.

[0124] For statistically sound results a multitude of individuals should be sampled, with n=50, 100, 200, 300, 400, 800 or 900, and a level of significance (α-error-level) of e.g. 0.05 or smaller, e.g. 0.05, preferably 0.01 or smaller. According to certain embodiments, particularly significant results can be obtained for n=200, 300, 400, 800 or 900.

[0125] For statistically sound results a multitude of individuals should be sampled, with n=50 or more, 100 or more, 200 or more, 300 or more, 400 or more, 800 or more or 900 or more, and a level of significance (α-error-level) of e.g. 0.05 or smaller, e.g. 0.05, preferably 0.01 or smaller. According to certain embodiments, particularly significant results can be obtained for n=200 or more, 300 or more, 400 or more, 800 or more or 900 or more.

[0126] After the above procedure has been carried out for more than 900, e.g. 987, individual strains of Staphylococcus species, particularly Staphylococcus aureus, the data disclosed in Tables 1 and 2 were obtained for the statistically best correlations between genetic variations and antimicrobial drug, e.g. antibiotic, resistances, particularly methicillin resistance. Thus, genetic variations in the positions given in Tables 1 and 2, with regard to the several reference genomes as above, were proven as valid markers for antimicrobial drug, e.g. antibiotic, resistance.

[0127] When referring to the second data set, wherein the second data set e.g. comprises, respectively is, a set of antimicrobial drug, e.g. antibiotic, resistances of a plurality of clinical isolates, this can, within the scope of the invention, also refer to a self-learning data base that, whenever a new sample is analyzed, can take this sample into the second data set and thus expand its data base. The second data set thus does not have to be static and can be expanded, either by external input or by incorporating new data due to self-learning. This is, however, not restricted to the third aspect of the invention, but applies to other aspects of the invention that refer to a second data set, which does not necessarily have to refer to antimicrobial drug resistance. The same applies, where applicable, to the first data set, e.g. in the third aspect.

[0128] According to certain embodiments, statistical analysis in the present methods is carried out using Fisher's test with p<10⁻⁶, preferably p<10⁻⁹.

[0129] The method of the first aspect of the present invention, as well as related methods, e.g. according to the 2^{nd}, 3^{rd} and 4^{th} aspect, can, according to certain embodiments, comprise correlating different genetic sites to each other. This way even higher statistical significance can be achieved.

[0130] According to certain embodiments of the method of the first aspect and related methods—as above, the second data set can be provided by culturing the clinical isolates of the microorganism on agar plates provided with antimicrobial drugs, e.g. antibiotics, at different concentrations, and the second data can be obtained by taking the minimal concentration of the plates that inhibits growth of the respective microorganism, e.g. Staphylococcus aureus.

[0131] According to certain embodiments of the method of the first aspect and related methods, the antimicrobial drug, e.g. antibiotic drug, is selected from the group consisting of β-lactams, β-lactam inhibitors, quinolines and derivatives thereof, e.g. fluoroquinolones, aminoglycosides, glycopeptides, lincosamides, macrolides, nitrofuranes, oxazolidinones polyketides, respectively tetracyclines, and folate synthesis inhibitors, e.g. benzene derived/sulfonamide antibiotics, preferably from the group consisting of Amoxicillin/Clavulanate, Ampicillin, Ampicillin/Sulbactam, Azithromycin, Cefalothin, Cefazolin, Cefepime, Cefotaxime, Cefoxitin, Ceftriaxone, Cefuroxime, Chloramphenicol, Ciprofloxacin, Clindamycin, Daptomycin, Ertapenem, Erythromycin, Fosfomycin, Fusidic acid, Gentamicin, Imipenem, Levofloxacin, Linezolid, Meropenem, Methicillin, Moxifloxacin, Mupirocin, Nitrofurantoin, Norfloxacin, Ofloxacin, Oxacillin, Penicillin G, Piperacillin/Tazobactam, Quinupristin/Dalfopristin, Rifampicin, Teicoplanin, Tetracycline, Tigecycline, Tobramycin, Trimethoprim/Sulfamethoxazole, and Vancomycin.

[0132] According to a second aspect, the present invention discloses a diagnostic method of determining an infection of a patient with a microorganism, particularly a bacterial microorganism potentially resistant to antimicrobial drug treatment, comprising the steps of:

[0133] a) obtaining or providing a sample containing or suspected of containing a microorganism, particularly a bacterial microorganism, from the patient;

[0134] b) determining the presence of at least one genetic variant in at least one position of the microorganism, particularly the bacterial microorganism, as determined by the method of the first aspect of the invention, wherein the presence of said at least one genetic variant is indicative of an infection with an antimicrobial drug resistant microorganism in said patient.

[0135] Again, the microorganism can be a Staphylococcus species, particularly Staphylococcus aureus, according to certain embodiments, and the drug methicillin and/or a drug as described below, e.g. with regard to the eight and ninth aspect.

[0136] With this method, any mutations in the genome of a microorganism, e.g. a Staphylococcus species, particularly Staphylococcus aureus, e.g. a clinical isolate with an unknown strain of the microorganism, particularly bacterial microorganism, correlated with antimicrobial drug, e.g. antibiotic, resistance can be determined and a thorough antimicrobial drug, e.g. antibiotic, resistance profile can be established.

[0137] Again, the different steps can herein be carried out as described with regard to the first aspect of the present invention.

[0138] According to this aspect, an infection with a microorganism, particularly a bacterial microorganism, e.g. a Staphylococcus, particularly Staphylococcus aureus, infection, in a patient can be determined using sequencing methods, as well as a resistance to antimicrobial drugs, e.g. antibiotics, of the microorganism, e.g. a Staphylococcus species, particularly Staphylococcus aureus, can be determined in a short amount of time compared to conventional methods.

[0139] In a third aspect, the present invention relates to a method of selecting a treatment of a patient suffering from an infection with a potentially resistant microorganism, particularly bacterial microorganism, comprising the steps of:

[0140] a) obtaining or providing a sample containing or suspected of containing a microorganism, particularly a bacterial microorganism, from the patient;

[0141] b) determining the presence of at least one genetic variant in at least one position of the microorganism, particularly bacterial microorganism, as determined by the method of the first aspect of the invention, wherein the presence of said at least one genetic variant is indicative of a resistance to one or more antimicrobial drugs;

[0142] c) identifying said at least one or more antimicrobial drugs; and

[0143] d) selecting one or more antimicrobial drugs different from the ones identified in step c) and being suitable for the treatment of the infection with the microorganism, particularly the bacterial microorganism.

[0144] This method can be carried out similarly to the second aspect of the invention and enables a fast was to select a suitable treatment with antibiotics for any infection with an unknown microorganism, particularly bacterial microorganism, e.g. Staphylococcus aureus.

[0145] In this method, as well as similar ones, no aligning is necessary, as the unknown sample can be directly correlated, after the genome or genome sequences are produced, with the second data set, and thus genetic variations and antimicrobial drug, e.g. antibiotic, resistances can be determined. The first data set can be assembled, for example, using known techniques.

[0146] According to certain embodiments, statistical analysis in the present method is carried out using Fisher's test with p<10⁻⁶, preferably p<10⁻⁹. Also, according to certain embodiments, the method further comprises correlating different genetic sites to each other.

[0147] A fourth aspect of the present invention relates to a method of acquiring, respectively determining, an antimicrobial drug, e.g. antibiotic, resistance profile for a clinical isolate of a microorganism, particularly a bacterial microorganism, comprising:

[0148] obtaining or providing at least one gene sequence of the clinical isolate of the microorganism, particularly the bacterial microorganism; and

[0149] determining the presence of genetic variants in the at least one gene sequence of the clinical isolate of the microorganism, particularly bacterial microorganism, as determined by the method of the first aspect of the invention.

[0150] With this method, antimicrobial drug, e.g. antibiotic, resistances in an unknown isolate of a microorganism, e.g. Staphylococcus aureus, can be determined.

[0151] A simple read out concept for a diagnostic test as described in this aspect is shown schematically in FIG. 1.

[0152] According to FIG. 1, a sample 1, e.g. blood from a patient, is used for molecular testing 2, e.g. using next generation sequencing (NGS), and then a molecular fingerprint 3 is taken, e.g. in case of NGS a sequence of selected genomic/plasmid regions or the whole genome is assembled. This is then compared to a reference library 4 containing several reference genomes and/or a pan-genome as obtained by the method of the first aspect, i.e. selected sequences or the whole sequence are/is compared to one or more reference sequences and/or a pan-genome, and genetic variations (SNPs, sequence—gene additions/deletions, etc.) are correlated with susceptibility/resistance profile of reference strains in the reference library. The reference library 4 herein contains many genomes and/or a pan-genome and is different from a reference genome. Then the result 5 is reported which can comprise ID (pathogen identification), i.e. a list of all (pathogenic) species identified in the sample, and AST (antimicrobial susceptibility testing), i.e. a list including a susceptibility/resistance profile for all species listed.

[0153] According to certain embodiments, statistical analysis in the present method is carried out using Fisher's test with p<10⁻⁶, preferably p<10⁻⁹. Also, according to certain embodiments, the method further comprises correlating different genetic sites to each other.

[0154] Again, in the third and fourth aspect, the different steps can herein be carried out as described with regard to the first aspect of the present invention, and the microorganism can be a Staphylococcus species, particularly Staphylococcus aureus, according to certain embodiments, and the antibiotic can be methicillin and/or another antibiotic as described below according to certain embodiments. In this regard, it should be noted that resistance to methicillin can indicate, particular in Staphylococcus species, particularly Staphylococcus aureus, resistance to β-lactam antibiotics.

[0155] In a fifth aspect the present invention relates to one or more computer program products comprising computer executable instructions which, when executed, perform a method according to any one of the first to the fourth aspect of the present invention.

[0156] In certain embodiments the computer program product is one on which program commands or program codes of a computer program for executing said method are stored. According to certain embodiments the computer program product is a storage medium. As noted above, the computer program products of the present invention can be self-learning, e.g. with respect to the first and second data sets.

[0157] In order to obtain the best possible information from the highly complex genetic data and develop an optimum model for diagnostic and therapeutical uses as well as the methods of the present invention—which can be applied stably in clinical routine—a thorough in silico analysis can be necessary. The proposed principle is based on a combination of different approaches, e.g. assembly of the genome of the microorganisms, at least in part and optionally annotating the genomes to one or more reference genomes and/or a pan-genome, or, in the second, third and/or fourth aspect, alignment of the sequence data of the clinical isolate to be determined with one or more reference genomes and/or a pan-genome, and correlation of genetic variations found in every sample, e.g. from each patient, respectively an unknown clinical isolate, with all references and drugs, e.g. antibiotics, or only one or some of them, and search for mutations which occur in one or several drug and one or several strains.

[0158] Using the above steps a list of genetic variations as well as of positions with regard to one or more reference genomes and/or a pan-genome is generated. These can be stored in databases and statistical models can be derived from the databases. The statistical models can be based on at least one or more genetic variations in at least one or more positions. Statistical models that can be trained can be combined from genetic variations and positions. Examples of algorithms that can produce such models are association Rules, Support Vector Machines, Decision Trees, Decision Forests, Discriminant-Analysis, Cluster-Methods, and many more.

[0159] The goal of the training is to allow a reproducible, standardized application during routine procedures.

[0160] For this, for example, a genome or parts of the genome of a microorganism can be sequenced from a patient to be diagnosed. Afterwards, core characteristics can be derived from the sequence data which can be used to predict resistance. These are the points in the database used for the final model, i.e. at least one genetic variation or at least one position, but also combinations of genetic variations, etc.

[0161] The corresponding characteristics can be used as input for the statistical model and thus enable a prognosis for new patients. Not only the information regarding all resistances of all microorganisms, e.g. of Staphylococcus aureus, against all or only some or one drugs, e.g. antibiotics, can be integrated in a computer decision support tool, but also corresponding directives (e.g. EUCAST) so that only treatment proposals are made that are in line with the directives.

[0162] A tenth aspect of the present invention relates to the use of the computer program product according to the fifth aspect, e.g. for acquiring an antimicrobial drug, e.g. antibiotic, resistance profile for microorganisms in the fourth aspect of the invention and/or for use in the diagnostic method of the second method of the invention and/or for selecting a treatment in the third aspect of the present invention and/or in the method of the first aspect of the present invention.

[0163] A sixth aspect of the present invention discloses a diagnostic method of determining an infection of a patient with a Staphylococcus species, particularly Staphylococcus aureus, potentially resistant to antimicrobial drug, e.g. antibiotic, treatment, comprising the steps of:

[0164] a) obtaining or providing a sample containing or suspected of containing at least one Staphylococcus, particularly Staphylococcus aureus, strain from the patient;

[0165] b) determining the presence of at least one genetic variation in at least two positions from the group of positions annotated with Nos. 1-50 with regard to the reference genomes with the genome names given in Table 1, wherein the presence of said at least two genetic variations is indicative of an infection with an antimicrobial drug, e.g. antibiotic, resistant Staphylococcus, particularly Staphylococcus aureus, strain in said patient wherein for some positions more than one position in different reference genomes is annotated.

[0166] As noted above, in Table 1, the position of the genetic variation (named “position”; with R being reverse direction and F being forward direction) are given for each variation (given with consecutive numbers 1-50) with reference to one or more known reference genomes from the NCBI (with the NCBI number given in the column “reference genome” and the genome name given in the column “genome name”).

[0167] An infection of a patient with Staphylococcus, particularly Staphylococcus aureus, potentially resistant to antimicrobial drug treatment herein means an infection of a patient with Staphylococcus aureus wherein it is unclear if the Staphylococcus, particularly Staphylococcus aureus, strain is susceptible to treatment with a specific antimicrobial drug or if it is resistant to the antimicrobial drug.

[0168] In step b) above, as well as corresponding steps, at least one genetic variation in at least two positions is determined, so that in total at least two genetic variations are determined, wherein the two genetic variations are in different positions. Again, it should be noted that in Table 1 a certain position can be annotated to more than one reference gene, so that also here only different positions are used, and not the same position that is annotated to different reference genomes.

[0169] In this method, as well as the other methods of the invention, the sample can be provided or obtained in any way, preferably non-invasive, and can be e.g. provided as an in vitro sample or prepared as in vitro sample.

[0170] According to certain aspects, genetic variations in at least two, three, four, five, six, seven, eight, nine or ten positions are determined in any of the methods of the present invention, e.g. in at least two positions or in at least three positions. Instead of testing only single positions, a combination of several variant positions can improve the prediction accuracy and further reduce false positive findings that are influenced by other factors. Therefore, it is in particular preferred to determine the presence of a genetic variation in 2, 3, 4, 5, 6, 7, 8 or 9 (or more) positions selected from Table 1.

[0171] For the above positions, i.e. the positions denoted in Table 1, the highest probability of a resistance to at least one antimicrobial drug, e.g. antibiotic, could be observed, with p-values smaller than 10¹⁴⁰, particularly smaller than 10¹⁶⁰, indicating the high significance of the values (n=987; α=10⁻⁹). Details regarding Table 1 can be taken from Table 2, respectively Tables 2a and 2b, disclosed in the Examples. Having at least two positions with genetic variations determined, a high probability of an antimicrobial drug, e.g. antibiotic, resistance could be determined. The genes in Table 1 thereby represent the 50 best genes for which a genetic variation was observed in the genomes of Staphylococcus, particularly Staphylococcus aureus, with regard to methicillin resistance/susceptibility as described above and below.

[0172] According to certain embodiments, the obtaining or providing a sample containing or suspected of containing at least one Staphylococcus species from the patient in this method—as well as the other methods of the invention—can comprise the following:

[0173] A sample of a vertebrate, e.g. a human, e.g. is provided or obtained and nucleic acid sequences, e.g. DNA or RNA sequences, are recorded by a known method for recording nucleic acid, which is not particularly limited. For example, nucleic acid can be recorded by a sequencing method, wherein any sequencing method is appropriate, particularly sequencing methods wherein a multitude of sample components, as e.g. in a blood sample, can be analyzed for nucleic acids and/or nucleic acid fragments and/or parts thereof contained therein in a short period of time, including the nucleic acids and/or nucleic acid fragments and/or parts thereof of Staphylococcus, particularly Staphylococcus aureus. For example, sequencing can be carried out using polymerase chain reaction (PCR), particularly multiplex PCR, or high throughput sequencing or next generation sequencing, preferably using high-throughput sequencing. For sequencing, preferably an in vitro sample is used.

[0174] The data obtained by the sequencing can be in any format, and can then be analyzed as described with regard to the first to fourth aspect of the present invention.

[0175] In a seventh aspect, the present invention relates to a method of selecting a treatment of a patient suffering from an infection with a potentially resistant Staphylococcus, particularly Staphylococcus aureus, strain, comprising the steps of:

[0176] a) obtaining or providing a sample containing or suspected of containing at least one Staphylococcus, particularly Staphylococcus aureus, strain from the patient;

[0177] b) determining the presence of at least one genetic variation in at least two positions from the group of positions annotated with Nos. 1-50 with regard to the reference genomes with the genome names given in Table 1, wherein the presence of said at least two genetic variations is indicative of a resistance to one or more antimicrobial, e.g. antibiotic, drugs, wherein for some positions more than one position in different reference genomes is annotated;

[0178] c) identifying said at least one or more antimicrobial, e.g. antibiotic, drugs; and

[0179] d) selecting one or more antimicrobial, e.g. antibiotic, drugs different from the ones identified in step c) and being suitable for the treatment of a Staphylococcus, particularly Staphylococcus aureus, infection.

[0180] In this method, the steps a) of obtaining or providing a sample and b) of determining the presence of at least one genetis variation are as in the method of the sixth aspect.

[0181] The identification of the at least one or more antimicrobial, e.g. antibiotic, drug in step c) is then based on the results obtained in step b) and corresponds to the antimicrobial, e.g. antibiotic, drug(s) that correlate(s) with the genetic variations. Once these antimicrobial drugs, e.g. antibiotics, are ruled out, the remaining antimicrobial drugs, e.g. antibiotic drugs/antibiotics, can be selected in step d) as being suitable for treatment.

[0182] In the description, references to the sixth and seventh aspect also apply to the 11, 12^{th}, 13^{th} and 14^{th} aspect, referring to the same positions, unless clear from the context that they don't apply.

[0183] According to certain embodiments of the sixth and or seventh aspect, the antimicrobial drug, e.g. antibiotic, in the method of the sixth or seventh aspectis at least one from the group consisting of β-lactams, β-lactam inhibitors, quinolines and derivatives thereof, e.g. fluoroquinolones, aminoglycosides, glycopeptides, lincosamides, macrolides, nitrofuranes, oxazolidinones polyketides, respectively tetracyclines, and folate synthesis inhibitors, e.g. benzene derived/sulfonamide antibiotics, particularly from the group consisting of Amoxicillin/Clavulanate, Ampicillin, Ampicillin/Sulbactam, Azithromycin, Cefalothin, Cefazolin, Cefepime, Cefotaxime, Cefoxitin, Ceftriaxone, Cefuroxime, Chloramphenicol, Ciprofloxacin, Clindamycin, Daptomycin, Ertapenem, Erythromycin, Fosfomycin, Fusidic acid, Gentamicin, Imipenem, Levofloxacin, Linezolid, Meropenem, Methicillin, Moxifloxacin, Mupirocin, Nitrofurantoin, Norfloxacin, Ofloxacin, Oxacillin, Penicillin G, Piperacillin/Tazobactam, Quinupristin/Dalfopristin, Rifampicin, Teicoplanin, Tetracycline, Tigecycline, Tobramycin, Trimethoprim/Sulfamethoxazole, and Vancomycin, particularly Methicillin.

[0184] In the methods of the invention the resistance of Staphylococcus, particularly Staphylococcus aureus, to one or more antimicrobial, e.g. antibiotic, drugs can be determined according to certain embodiments.

[0185] According to certain embodiments of the sixth and/or seventh aspect of the invention, determining the nucleic acid sequence information or the presence of a genetic variation comprises determining the presence of a single nucleotide at a single position. Thus the invention comprises methods wherein the presence of a single nucleotide polymorphism or mutation at a single nucleotide position is detected.

[0186] According to certain embodiments of the sixth and/or seventh aspect of the invention, the resistance of a Staphylococcus aureus strain against 1, 2, 3, 4, 5, 6, 7, 8, 9, 10, 11, 12, 13, 14, 15 or 16, 17, 18, 19, 20 or more antibiotic drugs is determined.

[0187] According to certain embodiments of the sixth and/or seventh aspect of the invention, a detected genetic variation is a genetic variation leading to an altered amino acid sequence, e.g. in a polypeptide derived from a respective gene, in which the detected genetic variation is located. According to this aspect, the detected genetic variation can thus lead to a truncated version of the polypeptide (wherein a new stop codon is created by the mutation) or a mutated version of the polypeptide having an amino acid exchange at the respective position.

[0188] According to certain embodiments of the sixth and/or seventh aspect of the invention, determining the nucleic acid sequence information with the positions having a genetic variation or the presence of a genetic variation comprises determining a partial sequence or an entire sequence comprising the position with the genetic variation.

[0189] According to certain embodiments of the sixth and/or seventh aspect of the invention, determining the nucleic acid sequence information with the positions having a genetic variation or the presence of a genetic variation comprises using a next generation sequencing or high throughput sequencing method. According to preferred embodiments of the sixth and/or seventh aspect of the invention, a partial or entire genome sequence of a Staphylococcus, particularly Staphylococcus aureus, strain is determined by using a next generation sequencing or high throughput sequencing method.

[0190] According to certain embodiments of the sixth and/or seventh aspect, determining the nucleic acid sequence information or the presence of a genetic variation comprises determining a partial or entire sequence of the genome of the Staphylococcus species, particularly Staphylococcus aureus, wherein said partial or entire sequence of the genome comprises at least one of the positions with the genetic variation.

[0191] An eleventh aspect of the present invention is directed to a method of treating a patient suffering from an antimicrobial drug, e.g. antibiotic, resistant Staphylococcus, particularly Staphylococcus aureus, infection, comprising the steps of:

[0192] a) obtaining or providing a sample containing or suspected of containing at least one Staphylococcus, particularly Staphylococcus aureus, strain from the patient;

[0193] b) determining the presence of at least one genetic variation in at least two positions from the group of positions annotated with Nos. 1-50 with regard to the reference genomes with the genome names given in Table 1, wherein the presence of said at least two genetic variations is indicative of a resistance to one or more antimicrobial, e.g. antibiotic, drugs, wherein for some positions more than one position in different reference genomes is annotated;

[0194] c) identifying said at least one or more antimicrobial, e.g. antibiotic, drugs;

[0195] d) selecting one or more antimicrobial, e.g. antibiotic, drugs different from the ones identified in step c) and being suitable for the treatment of a Staphylococcus, particularly Staphylococcus aureus, infection; and

[0196] e) treating the patient with said one or more antimicrobial, e.g. antibiotic, drugs.

[0197] Herein, steps a) to d) can be carried out as described with respect to the seventh aspect. Step e) can be sufficiently carried out without being restricted and can be done e.g. non-invasively.

[0198] A twelfth aspect of the present invention discloses a diagnostic method of determining an infection of a patient with a Staphylococcus species, particularly Staphylococcus aureus, potentially resistant to antimicrobial drug, e.g. antibiotic, treatment, comprising the steps of:

[0199] a) obtaining or providing a sample containing or suspected of containing at least one Staphylococcus, particularly Staphylococcus aureus, strain from the patient;

[0200] b) determining the presence of at least one genetic variation in at least one position from the group of positions annotated with Nos. 1-50 with regard to the reference genomes with the genome names given in Table 1, wherein the presence of said at least one genetic variation is indicative of an infection with an antimicrobial drug, e.g. antibiotic, resistant Staphylococcus, particularly Staphylococcus aureus, strain in said patient, wherein for some positions more than one position in different reference genomes is annotated.

[0201] In a thirteenth aspect, the present invention relates to a method of selecting a treatment of a patient suffering from an infection with a potentially resistant Staphylococcus, particularly Staphylococcus aureus, strain, comprising the steps of:

[0202] a) obtaining or providing a sample containing or suspected of containing at least one Staphylococcus, particularly Staphylococcus aureus, strain from the patient;

[0203] b) determining the presence of at least one genetic variation in at least one position from the group of positions annotated with Nos. 1-50 with regard to the reference genomes with the genome names given in Table 1, wherein the presence of said at least one genetic variation is indicative of a resistance to one or more antimicrobial, e.g. antibiotic, drugs, wherein for some positions more than one position in different reference genomes is annotated;

[0204] c) identifying said at least one or more antimicrobial, e.g. antibiotic, drugs; and

[0205] d) selecting one or more antimicrobial, e.g. antibiotic, drugs different from the ones identified in step c) and being suitable for the treatment of a Staphylococcus, particularly Staphylococcus aureus, infection.

[0206] Again, in the twelfth and the thirteenth aspect the steps correspond to those in the sixth or seventh aspect, although only a mutation in at least one gene is determined.

[0207] A fourteenth aspect of the present invention is directed to a method of treating a patient suffering from an antimicrobial drug, e.g. antibiotic, resistant Staphylococcus, particularly Staphylococcus aureus, infection, comprising the steps of:

[0208] a) obtaining or providing a sample containing or suspected of containing at least one Staphylococcus aureus strain from the patient;

[0209] b) determining the presence of at least one genetic variation in at least one position from the group of positions annotated with Nos. 1-50 with regard to the reference genomes with the genome names given in Table 1, wherein the presence of said at least one genetic variation is indicative of a resistance to one or more antimicrobial, e.g. antibiotic, drugs, wherein for some positions more than one position in different reference genomes is annotated;

[0210] c) identifying said at least one or more antimicrobial, e.g. antibiotic, drugs;

[0211] d) selecting one or more antimicrobial, e.g. antibiotic, drugs different from the ones identified in step c) and being suitable for the treatment of a Staphylococcus, particularly Staphylococcus aureus, infection; and

[0212] e) treating the patient with said one or more antimicrobial, e.g. antibiotic, drugs.

[0213] Also in the fourteenth aspect of the invention, steps a) to d) are analogous to the steps in the method of the eleventh aspect of the present invention. Step e) can again be sufficiently carried out without being restricted and can be done e.g. non-invasively.

[0214] An eighth aspect of the present invention discloses a diagnostic method of determining an infection of a patient with a Staphylococcus species, particularly Staphylococcus aureus, potentially resistant to antimicrobial drug, e.g. antibiotic, treatment, comprising the steps of:

[0215] a) obtaining or providing a sample containing or suspected of containing at least one Staphylococcus, particularly Staphylococcus aureus, strain from the patient;

[0216] b) determining the presence of at least one genetic variation in at least two positions from the group of positions annotated with Nos. 1-50 with regard to the reference genomes with the genome names given in Tables 3a and/or 3b, particular with regard to the reference genomes with the genome names given in Table 3b, wherein the presence of said at least two genetic variations is indicative of an infection with an antimicrobial drug, e.g. antibiotic, resistant Staphylococcus, particularly Staphylococcus aureus, strain in said patient wherein for some positions more than one position in different reference genomes is annotated.

[0217] As noted above, in Tables 3a and 3b, the position of the genetic variation (named “position”; with R being reverse direction and F being forward direction) are given for each variation (given with consecutive numbers 1-50) with reference to one or more known reference genomes from the NCBI (with the NCBI number given in the column “reference genome” and the genome name given in the column “genome name”).

[0218] An infection of a patient with a Staphylococcus species, particularly Staphylococcus aureus, potentially resistant to antimicrobial drug treatment herein means an infection of a patient with a Staphylococcus species, particularly Staphylococcus aureus, wherein it is unclear if the Staphylococcus species, particularly Staphylococcus aureus, is susceptible to treatment with a specific antimicrobial drug or if it is resistant to the antimicrobial drug.

[0219] In step b) above, as well as corresponding steps, at least one genetic variation in at least two positions is determined, so that in total at least two genetic variations are determined, wherein the two genetic variations are in different positions. Again, it should be noted that in Tables 3a and 3b a certain position can be annotated to more than one reference gene, so that also here only different positions are used, and not the same position that is annotated to different reference genomes.

[0220] In this method, as well as the other methods of the invention, the sample can be provided or obtained in any way, preferably non-invasive, and can be e.g. provided as an in vitro sample or prepared as in vitro sample.

[0221] According to certain aspects, genetic variations in at least two, three, four, five, six, seven, eight, nine or ten positions are determined in any of the methods of the present invention, e.g. in at least two positions or in at least three positions. Instead of testing only single positions, a combination of several variant positions can improve the prediction accuracy and further reduce false positive findings that are influenced by other factors. Therefore, it is in particular preferred to determine the presence of a genetic variation in 2, 3, 4, 5, 6, 7, 8 or 9 (or more) positions selected from Tables 3a and/or 3b.

[0222] For the above positions, i.e. the positions denoted in Tables 3a and/or 3b, the highest probability of a resistance to at least one antimicrobial drug, e.g. antibiotic, could be observed, with p-values smaller than 10¹⁶⁰, particularly smaller than 10⁻¹⁹⁰, indicating the high significance of the values (n=985; α=10⁻⁹). Details regarding Tables 3a and 3b can be taken from Table 4, particularly Tables 4a-d with regard to Table 3a and Tables 4e-h with regard to Table 3b, disclosed in the Examples. Having at least two positions with genetic variations determined, a high probability of an antimicrobial drug, e.g. antibiotic, resistance could be determined. The genes in Table 3a thereby represent the 50 best genes for which a mutation was observed in the genomes of Staphylococcus species, particularly S. aureus, particularly with regard to resistance to the antibiotics described below, i.e. the group consisting of Amoxicillin/Clavulanate, Ampicillin, Ampicillin/Sulbactam, Azithromycin, Cefalothin, Cefazolin, Cefepime, Cefotaxime, Cefoxitin, Ceftriaxone, Cefuroxime, Chloramphenicol, Ciprofloxacin, Clindamycin, Daptomycin, Ertapenem, Erythromycin, Fosfomycin, Fusidic acid, Gentamicin, Imipenem, Levofloxacin, Linezolid, Meropenem, Moxifloxacin, Mupirocin, Nitrofurantoin, Norfloxacin, Ofloxacin, Oxacillin, Penicillin G, Piperacillin/Tazobactam, Quinupristin/Dalfopristin, Rifampicin, Teicoplanin, Tetracycline, Tigecycline, Tobramycin, Trimethoprim/Sulfamethoxazole, and Vancomycin, whereas the genes in Table 3b represent the 50 best genes for which a cross-correlation could be observed for the antimicrobial drug, e.g. antibiotic, susceptibility testing, particularly with regard to resistance to the antibiotics as above with regard to Table 3a, for Staphylococcus species, particularly S. aureus, as described below.

[0223] According to certain embodiments, the obtaining or providing a sample containing or suspected of containing at least one Staphylococcus from the patient in this method—as well as the other methods of the invention—can comprise the following:

[0224] A sample of a vertebrate, e.g. a human, e.g. is provided or obtained and nucleic acid sequences, e.g. DNA or RNA sequences, are recorded by a known method for recording nucleic acid, which is not particularly limited. For example, nucleic acid can be recorded by a sequencing method, wherein any sequencing method is appropriate, particularly sequencing methods wherein a multitude of sample components, as e.g. in a blood sample, can be analyzed for nucleic acids and/or nucleic acid fragments and/or parts thereof contained therein in a short period of time, including the nucleic acids and/or nucleic acid fragments and/or parts thereof of the Staphylococcus species, particularly Staphylococcus aureus. For example, sequencing can be carried out using polymerase chain reaction (PCR), particularly multiplex PCR, or high throughput sequencing or next generation sequencing, preferably using high-throughput sequencing. For sequencing, preferably an in vitro sample is used.

[0225] The data obtained by the sequencing can be in any format, and can then be analyzed as described with regard to the first to fourth aspect of the present invention.

[0226] In a ninth aspect, the present invention relates to a method of selecting a treatment of a patient suffering from an infection with a potentially resistant Staphylococcus, particularly Staphylococcus aureus, strain, comprising the steps of:

[0227] a) obtaining or providing a sample containing or suspected of containing at least one Staphylococcus, particularly Staphylococcus aureus, strain from the patient;

[0228] b) determining the presence of at least one genetic variation in at least two positions from the group of positions annotated with Nos. 1-50 with regard to the reference genomes with the genome names given in Tables 3a and/or 3b, particular with regard to the reference genomes with the genome names given in Table 3b, wherein the presence of said at least two genetic variations is indicative of a resistance to one or more antimicrobial, e.g. antibiotic, drugs, wherein for some positions more than one position in different reference genomes is annotated;

[0229] c) identifying said at least one or more antimicrobial, e.g. antibiotic, drugs; and

[0230] d) selecting one or more antimicrobial, e.g. antibiotic, drugs different from the ones identified in step c) and being suitable for the treatment of a Staphylococcus, particularly Staphylococcus aureus, infection.

[0231] In this method, the steps a) of obtaining or providing a sample and b) of determining the presence of at least one genetic variation are as in the method of the eighth aspect.

[0232] The identification of the at least one or more antimicrobial, e.g. antibiotic, drug in step c) is then based on the results obtained in step b) and corresponds to the antimicrobial, e.g. antibiotic, drug(s) that correlate(s) with the genetic variations. Once these antimicrobial drugs, e.g. antibiotics, are ruled out, the remaining antimicrobial drugs, e.g. antibiotic drugs/antibiotics, can be selected in step d) as being suitable for treatment.

[0233] In the description, references to the eighth and ninth aspect also apply to the 15^{th}, 16^{th}, 17^{th} and 18^{th} aspect, referring to the same positions, unless clear from the context that they don't apply.

[0234] According to certain embodiments of the eighth and/or ninth aspect, the antimicrobial drug, e.g. antibiotic, in the method of the eighth or ninth aspect, as well as in the other methods of the invention, is at least one from the group consisting of β-lactams, β-lactam inhibitors, quinolines and derivatives thereof, e.g. fluoroquinolones, aminoglycosides, glycopeptides, lincosamides, macrolides, nitrofuranes, oxazolidinones polyketides, respectively tetracyclines, and folate synthesis inhibitors, e.g. benzene derived/sulfonamide antibiotics, particularly from the group consisting of Amoxicillin/Clavulanate, Ampicillin, Ampicillin/Sulbactam, Azithromycin, Cefalothin, Cefazolin, Cefepime, Cefotaxime, Cefoxitin, Ceftriaxone, Cefuroxime, Chloramphenicol, Ciprofloxacin, Clindamycin, Daptomycin, Ertapenem, Erythromycin, Fosfomycin, Fusidic acid, Gentamicin, Imipenem, Levofloxacin, Linezolid, Meropenem, Methicillin, Moxifloxacin, Mupirocin, Nitrofurantoin, Norfloxacin, Ofloxacin, Oxacillin, Penicillin G, Piperacillin/Tazobactam, Quinupristin/Dalfopristin, Rifampicin, Teicoplanin, Tetracycline, Tigecycline, Tobramycin, Trimethoprim/Sulfamethoxazole, and Vancomycin. In the eighth and/or ninth aspect, as well as the fifteenth to eighteenth aspect, the antimicrobial drug, e.g. antibiotic is preferably at least one from the group consisting of β-lactams, β-lactam inhibitors, quinolines and derivatives thereof, e.g. fluoroquinolones, aminoglycosides, glycopeptides, lincosamides, macrolides, nitrofuranes, oxazolidinones polyketides, respectively tetracyclines, and folate synthesis inhibitors, e.g. benzene derived/sulfonamide antibiotics, particularly from the group consisting of Amoxicillin/Clavulanate, Ampicillin, Ampicillin/Sulbactam, Azithromycin, Cefalothin, Cefazolin, Cefepime, Cefotaxime, Cefoxitin, Ceftriaxone, Cefuroxime, Chloramphenicol, Ciprofloxacin, Clindamycin, Daptomycin, Ertapenem, Erythromycin, Fosfomycin, Fusidic acid, Gentamicin, Imipenem, Levofloxacin, Linezolid, Meropenem, Moxifloxacin, Mupirocin, Nitrofurantoin, Norfloxacin, Ofloxacin, Oxacillin, Penicillin G, Piperacillin/Tazobactam, Quinupristin/Dalfopristin, Rifampicin, Teicoplanin, Tetracycline, Tigecycline, Tobramycin, Trimethoprim/Sulfamethoxazole, and Vancomycin.

[0235] In the methods of the invention the resistance of a Staphylococcus species, particularly Staphylococcus aureus, to one or more antimicrobial, e.g. antibiotic, drugs can be determined according to certain embodiments.

[0236] According to certain embodiments of the eighth and/or ninth aspect of the invention, determining the nucleic acid sequence information or the presence of a genetic variation comprises determining the presence of a single nucleotide at a single position. Thus the invention comprises methods wherein the presence of a single nucleotide polymorphism or mutation at a single nucleotide position is detected.

[0237] According to certain embodiments of the eighth and/or ninth aspect of the invention, the resistance of a Staphylococcus, particularly Staphylococcus aureus, strain against 1, 2, 3, 4, 5, 6, 7, 8, 9, 10, 11, 12, 13, 14, 15 or 16, 17, 18, 19, 20 or more antibiotic drugs is determined.

[0238] According to certain embodiments of the eighth and/or ninth aspect of the invention, a detected genetic variation is a genetic variation leading to an altered amino acid sequence, e.g. in a polypeptide derived from a respective gene, in which the detected genetic variation is located. According to this aspect, the detected genetic variation can thus lead to a truncated version of the polypeptide (wherein a new stop codon is created by the mutation) or a mutated version of the polypeptide having an amino acid exchange at the respective position.

[0239] According to certain embodiments of the eighth and/or ninth aspect of the invention, determining the nucleic acid sequence information with the positions having a genetic variation or the presence of a genetic variation comprises determining a partial sequence or an entire sequence comprising the position with the genetic variation.

[0240] According to certain embodiments of the eighth and/or ninth aspect of the invention, determining the nucleic acid sequence information with the positions having a genetic variation or the presence of a genetic variation comprises using a next generation sequencing or high throughput sequencing method. According to preferred embodiments of the eighth and/or ninth aspect of the invention, a partial or entire genome sequence of a Staphylococcus, particularly Staphylococcus aureus, strain is determined by using a next generation sequencing or high throughput sequencing method.

[0241] According to certain embodiments of the eighth and/or ninth aspect, determining the nucleic acid sequence information or the presence of a genetic variation comprises determining a partial or entire sequence of the genome of the Staphylococcus species, particularly Staphylococcus aureus, wherein said partial or entire sequence of the genome comprises at least one of the positions with the genetic variation.

[0242] According to certain embodiments of the eighth and/or ninth aspect of the invention, as well as 15^{th}, 16^{th}, 17^{th} and/or 18^{th} aspect, the position is from Table 3a, and the antibiotic class is at least one of the ones (column: sign_phenos_class) given for the respective position in Table 4a and/or the antibiotic is at least one of the ones (column: sign_phenos) given for the respective position in Table 4a.

[0243] According to certain embodiments of the eighth and/or ninth aspect of the invention, as well as 15^{th}, 16^{th}, 17^{th} and/or 18^{th} aspect, the position is from Table 3a, and at least one antibiotic is from the antibiotic class (column: best_pheno_class) given for the respective position in Table 4d and/or at least one antibiotic is the antibiotic (column: best_pheno) given for the respective position in Table 4d.

[0244] According to certain embodiments of the eighth and/or ninth aspect of the invention, as well as 15^{th}, 16^{th}, 17^{th} and/or 18^{th} aspect, the position is from Table 3b, and the antibiotic class is at least one of the ones (column: sign_phenos_class) given for the respective position in Table 4e and/or the antibiotic is at least one of the ones (column: sign_phenos) given for the respective position in Table 4e.

[0245] According to certain embodiments of the eighth and/or ninth aspect of the invention, as well as 15^{th}, 16^{th}, 17^{th} and/or 18^{th} aspect, the position is from Table 3b, and at least one antibiotic is from the antibiotic class (column: best_pheno_class) given for the respective position in Table 4h and/or at least one antibiotic is the antibiotic (column: best_pheno) given for the respective position in Table 4h.

[0246] A fifteenth aspect of the present invention is directed to a method of treating a patient suffering from an antimicrobial drug, e.g. antibiotic, resistant Staphylococcus, particularly Staphylococcus aureus, infection, comprising the steps of:

[0247] a) obtaining or providing a sample containing or suspected of containing at least one Staphylococcus, particularly Staphylococcus aureus, strain from the patient;

[0248] b) determining the presence of at least one genetic variation in at least two positions from the group of positions annotated with Nos. 1-50 with regard to the reference genomes with the genome names given in Tables 3a and/or 3b, particular with regard to the reference genomes with the genome names given in Table 3b, wherein the presence of said at least two genetic variations is indicative of a resistance to one or more antimicrobial, e.g. antibiotic, drugs, wherein for some positions more than one position in different reference genomes is annotated;

[0249] c) identifying said at least one or more antimicrobial, e.g. antibiotic, drugs;

[0250] d) selecting one or more antimicrobial, e.g. antibiotic, drugs different from the ones identified in step c) and being suitable for the treatment of the Staphylococcus, particularly Staphylococcus aureus, infection; and

[0251] e) treating the patient with said one or more antimicrobial, e.g. antibiotic, drugs.

[0252] Herein, steps a) to d) can be carried out as described with respect to the ninth aspect. Step e) can be sufficiently carried out without being restricted and can be done e.g. non-invasively.

[0253] A sixteenth aspect of the present invention discloses a diagnostic method of determining an infection of a patient with a Staphylococcus species, particularly Staphylococcus aureus, potentially resistant to antimicrobial drug, e.g. antibiotic, treatment, comprising the steps of:

[0254] a) obtaining or providing a sample containing or suspected of containing at least one Staphylococcus, particularly Staphylococcus aureus, strain from the patient;

[0255] b) determining the presence of at least one genetic variation in at least one position from the group of positions annotated with Nos. 1-50 with regard to the reference genomes with the genome names given in Tables 3a and/or 3b, particular with regard to the reference genomes with the genome names given in Table 3b, wherein the presence of said at least one genetic variation is indicative of an infection with an antimicrobial drug, e.g. antibiotic, resistant Staphylococcus, particularly Staphylococcus aureus, strain in said patient, wherein for some positions more than one position in different reference genomes is annotated.

[0256] In a seventeenth aspect, the present invention relates to a method of selecting a treatment of a patient suffering from an infection with a potentially resistant Staphylococcus, particularly Staphylococcus aureus, strain, comprising the steps of:

[0257] a) obtaining or providing a sample containing or suspected of containing at least one Staphylococcus, particularly Staphylococcus aureus, strain from the patient;

[0258] b) determining the presence of at least one genetic variation in at least one position from the group of positions annotated with Nos. 1-50 with regard to the reference genomes with the genome names given in Tables 3a and/or 3b, particular with regard to the reference genomes with the genome names given in Table 3b, wherein the presence of said at least one genetic variation is indicative of a resistance to one or more antimicrobial, e.g. antibiotic, drugs, wherein for some positions more than one position in different reference genomes is annotated;

[0259] c) identifying said at least one or more antimicrobial, e.g. antibiotic, drugs; and

[0260] d) selecting one or more antimicrobial, e.g. antibiotic, drugs different from the ones identified in step c) and being suitable for the treatment of a Staphylococcus, particularly Staphylococcus aureus, infection.

[0261] Again, in the sixteenth and the seventeenth aspect the steps correspond to those in the eighth or ninth aspect, although only a mutation in at least one gene is determined.

[0262] An eighteenth aspect of the present invention is directed to a method of treating a patient suffering from an antimicrobial drug, e.g. antibiotic, resistant Staphylococcus, particularly Staphylococcus aureus, infection, comprising the steps of:

[0263] a) obtaining or providing a sample containing or suspected of containing at least one Staphylococcus, particularly Staphylococcus aureus, strain from the patient;

[0264] b) determining the presence of at least one genetic variation in at least one position from the group of positions annotated with Nos. 1-50 with regard to the reference genomes with the genome names given in Tables 3a and/or 3b, particular with regard to the reference genomes with the genome names given in Table 3b, wherein the presence of said at least one genetic variation is indicative of a resistance to one or more antimicrobial, e.g. antibiotic, drugs, wherein for some positions more than one position in different reference genomes is annotated;

[0265] c) identifying said at least one or more antimicrobial, e.g. antibiotic, drugs;

[0266] d) selecting one or more antimicrobial, e.g. antibiotic, drugs different from the ones identified in step c) and being suitable for the treatment of a Staphylococcus, particularly Staphylococcus aureus, infection; and

[0267] e) treating the patient with said one or more antimicrobial, e.g. antibiotic, drugs.

[0268] Also in the eighteenth aspect of the invention, steps a) to d) are analogous to the steps in the method of the fifteenth aspect of the present invention. Step e) can again be sufficiently carried out without being restricted and can be done e.g. non-invasively.

### EXAMPLES

[0269] The present invention will now be described in detail with reference to several examples thereof. However, these examples are illustrative and do not limit the scope of the invention.

### Example 1

### Determination of Genetic Resistance Profile for MRSA/MSSA Phenotype

[0270] Whole genome sequencing was carried out in addition to classical antimicrobial susceptibility testing of the same isolates for a cohort of 1001 specimens of S. aureus, of which 995 had an assembly and 987 had an assembly and an MRSA/MSSA phenotype. These 987 samples were used for further analysis. The whole genome sequencing allowed performing genome wide correlation studies to find genetic variants (e.g. point mutations, small insertions and deletion, larger structural variants, plasmid copy number gains, gene dosage effects) in the genome and plasmids that are significantly correlated to the resistance against one or several drugs. The approach also allowed for comparing the relevant sites in the genome to each other.

[0271] In the approach the different sources of genetic resistance as well as the different ways of how bacteria can become resistant were covered. By measuring clinical isolates collected in a broad geographical area and across a broad time span of three decades a complete picture going far beyond the rather artificial step of laboratory generated resistance mechanisms was tried to be generated.

[0272] The detailed procedure is given in the following:

[0273] Bacterial Strains

[0274] The inventors selected 1001 specimens of S. aureus from the microbiology strain collection at Siemens Healthcare Diagnostics (West Sacramento, Calif.) for susceptibility testing and whole genome sequencing, of which 987 were further analyzed, as stated above. To include data on the different ways how resistance mechanisms are acquired Staphylococcus aureus isolates collected over more than three decades were analyzed such that also horizontal gene transfer could potentially be discovered.

[0275] Determination of Methicillin Resistance/Susceptibility

[0276] MRSA and MSSA strains were determined by culturing according to standard procedures, determining the phenotype of the strains, and confirmed by further tests using e.g. the genetic information.

[0277] DNA Extraction

[0278] DNA extraction and purification was carried out using the MagAttract HMW DNA Kit (Qiagen) procedure with the following changes. After up to 2×10⁹ bacteria (1 ml culture) were centrifuged in a 2 ml tube (10 min, 5000×g) and the supernatant was discharged, it was again centrifuged 1 min and the sample was taken. The resulting pellet was dispersed in 160 μl P1, 20 μl lysozyme (100 mg/ml) and 4 μl lysostaphin were added and mixed, and the suspension was incubated at 37° C. at 900 rpm for 30 mins in a thermal mixer. Afterwards 300 μl lysis buffer and proteinase K (30 μl) (both from the blood kit for Maxwell of Promega) were added and the whole again incubated for 30 mins at 56° C. and 900 rpm. The samples as a whole (˜510 μl) were then transferred to the Maxwell cartridges for further processing, using the Tissue LEV Total RNA Kit AS1220 or the XAS1220 Custom Kit (Promega).

[0279] Next Generation Sequencing

[0280] Prior to library preparation, quality control of isolated bacterial DNA was conducted using a Qubit 2.0 Fluorometer (Qubit dsDNA BR Assay Kit, Life Technologies) and an Agilent 2200 TapeStation (Genomic DNA ScreenTape, Agilent Technologies). NGS libraries were prepared in 96 well format using NexteraXT DNA Sample Preparation Kit and NexteraXT Index Kit for 96 Indexes (Illumina) according to the manufacturer's protocol. The resulting sequencing libraries were quantified in a qPCR-based approach using the KAPA SYBR FAST qPCR MasterMix Kit (Peqlab) on a ViiA 7 real time PCR system (Life Technologies). 96 samples were pooled per lane for paired-end sequencing (2×100 bp) on Illumina Hiseq2000 or Hiseq2500 sequencers using TruSeq PE Cluster v3 and TruSeq SBS v3 sequncing chemistry (Illumina). Basic sequencing quality parameters were determined using the FastQC quality control tool for high throughput sequence data (Babraham Bioinformatics Institute).

[0281] Data Analysis

[0282] Trimmomatic (version 0.32, Bolger A M, Lohse M, Usadel B. Trimmomatic: a flexible trimmer for Illumina sequence data. Bioinformatics. 2014;30(15):2114-2120.

[0283] doi:10.1093/bioinformatics/btu170) was used for adapter and quality trimming of raw reads with following parameters ILLUMINACLIP:NexteraPE-PE.fa:1:50:30 LEADING:3 TRAILING:3 SLIDINGWINDOW:4:15 MINLEN:36. De novo assemblies were constructed using SPAdes (version 3.0.0, Bankevich A, Nurk S, Antipov D, et al. SPAdes: A New Genome Assembly Algorithm and Its Applications to Single-Cell Sequencing. Journal of Computational Biology. 2012;19(5):455-477.

[0284] doi:10.1089/cmb.2012.0021) with parameters −t 20 −m 256 −k 21,33,55,77—careful −1 fp.fastq.gz −2 rp.fastq.gz. To determine the quality of the assemblies we ran QUASI (version 2.3) with minimal length threshold of 500 bp. Resulting metric values not matching the RefSeq assembly quality criteria (N50>5000, L50<20, # contigs<1000) were highlighted.

[0285] SNP Calling:

[0286] Reference-free SNP calling was performed using tool kSNP3 which applies k-mer analysis, i.e. the tool considers all possible k-mers found in given data. The central base of a k-mer is the SNP (example k=21 “AAAGTTTCGCAGTTGGTAATA”, SNP=A), the bases on its left and right site are SNP's context.
[0287] Tool URL: http://sourceforge.net/projects/ksnp/files/

[0288] The following input was used:
[0289] 49 finished S. aureus genomes from NCBI including the chromosome and available plasmids
[0290] 995 S. aureus de novo assemblies (see above)
[0291] In total: 995+49=1044 samples

[0292] The finished genomes were used to choose the parameter k, the chosen value was 21, as determined by the tool.

[0293] SNP Calling Results:

[0294] The output contained 487,415 SNPs annotated using given finished genomes resulting in 9,419,797 annotations in total. SNPs can have following values: bases A/T/C/G or “−” (missing), the latter means, that the considered genomic part is missing (e.g. gene absence). With the results, the annotations used in Table 2 were obtained along with other annotations (see Table 2 and annotations for details)

[0295] Extracting SNP Annotations:

[0296] To reduce the number of similar annotations they were filtered and aggregated as follows:
[0297] Only annotations for which the considered SNP lies on a protein were kept
[0298] Only annotations whose “product” entry and “note” entry do not contain “hypothetical protein” were kept
[0299] Annotations were sorted by SNP ID (“LocusNum”) and gene product (“product”)
[0300] For each unique pair of SNP ID and gene product only the first line was kept

[0301] Association Testing:

[0302] In addition, the following SNPs were not considered:
[0303] SNPs without any annotation or SNPs whose all annotations contained a flag “synonymous” were not considered→only SNPs with at least one non-synonymous annotation were considered
[0304] Constant SNPs, i.e. same value for all samples were also not considered
[0305] Almost constant SNPs: SNPs whose most frequent value had a frequency>=95%, i.e. min. 95% of all samples have the same SNP value, were not considered as well
[0306] SNPs with missing value (“−”) for more than 10% of samples were also removed

[0307] In total 14,856 SNPs were kept for association tests. Fisher's exact two-sided test was applied with subsequent p-value adjustment using FDR and p-value threshold of 10⁻⁹. In total 7,925 SNPs have a significant adjusted p-value, 7101 of them have at least one annotation.

[0308] Annotation:

[0309] Annotation of the found SNPs was carried out using 49 reference genomes available at NCBI, with the names of the genomes and the reference sequence ID at NCBI (for chromosomes; respectively plasmids) given in the following Table 5.

| Genome name | RefSeq ID Chr; plasmids |
|---|---|
| 04_02981 | NC_017340.fna; |
| 08BA02176 | NC_018608.fna; |
| 11819_97 | NC_017351.fna;NC_017350.fna |
| 55_2053 | NC_022113.fna;NC_022126.fna |
| 6850 | NC_022222.fna; |
| 71193 | NC_017673.fna; |
| Bmb9393 | NC_021670.fna;NC_021657.fna |
| CC45 | NC_021554.fna;NC_021552.fna |
| CN1 | NC_022226.fna;NC_022227.fna, NC_022228.fna |
| COL | NC_002951.fna;NC_006629.fna |
| ECT_R_2 | NC_017343.fna;NC_017346.fna, NC_017344.fna |
| ED133 | NC_017337.fna; |
| ED98 | NC_013450.fna;NC_013451.fna, NC_013452.fna, NC_013453.fna |
| HO_5096_0412 | NC_017763.fna; |
| JH1 | NC_009632.fna;NC_009619.fna |
| JH9 | NC_009487.fna;NC_009477.fna |
| JKD6008 | NC_017341.fna; |
| JKD6159 | NC_017338.fna;NC_017339.fna |
| LGA251 | NC_017349.fna;NC_017348.fna |
| M013 | NC_016928.fna; |
| M1 | NC_021059.fna;NC_021060.fna |
| MRSA252 | NC_002952.fna; |
| MSHR1132 | NC_016941.fna;NC_016942.fna |
| MSSA476 | NC_002953.fna;NC_005951.fna |
| Mu3 | NC_009782.fna; |
| Mu50 | NC_002758.fna;NC_002774.fna |
| MW2 | NC_003923.fna; |
| N315 | NC_002745.fna;NC_003140.fna |
| NCTC_8325 | NC_007795.fna; |
| Newman | NC_009641.fna; |
| RF122 | NC_007622.fna; |
| SA40 | NC_022443.fna; |
| SA957 | NC_022442.fna; |
| ST228_10388 | NC_020529.fna;NC_020530.fna |
| ST228_10497 | NC_020564.fna;NC_020531.fna |
| ST228_15532 | NC_020532.fna;NC_020565.fna |
| ST228_16035 | NC_020533.fna;NC_020534.fna |
| ST228_18412 | NC_020537.fna;NC_020538.fna |
| ST398 | NC_017333.fna;NC_017335.fna, NC_017334.fna, NC_017336.fna |
| T0131 | NC_017347.fna; |
| TCH60 | NC_017342.fna;NC_017345.fna |
| TW20 | NC_017331.fna;NC_017332.fna, NC_017352.fna |
| uid193758 | NC_020566.fna;NC_020535.fna |
| uid193759 | NC_020536.fna;NC_020567.fna |
| uid193761 | NC_020568.fna;NC_020539.fna |
| USA300_FPR3757 | NC_007793.fna;NC_007792.fna, NC_007791.fna, NC_007790.fna |
| USA300_TCH1516 | NC_010079.fna;NC_010063.fna, NC_012417.fna |
| VC40 | NC_016912.fna; |
| Z172 | NC_022604.fna;NC_022610.fna, NC_022605.fna |

[0310] From the data, the 50 genes with the best p-value were chosen for the list of genetic variants with regard to methicillin resistance.

[0311] A full list of all positions, p-values, affected genes etc. is provided in Table 2, respectively Tables 2a and 2b, which corresponds to Table 1, and represents the genes having the lowest p-values after correlating the genetic variations with antibiotic resistance.

[0312] In Table 2, respectively Tables 2a and 2b, the positions are numbered according to the best p-value results, ranging from 1 to 50. Further, the positions are also annotated with regard to one or more reference genomes of the 49 finished S. aureus genomes from NCBI, wherein the found reference genomes are the following as annotated at the NCBI:

[0313] NC_017340, NC_010079, NC_022222, NC_021670, NC_017351,

[0314] NC_002953, NC_017337, NC_018608, NC_007795, NC_021059,

[0315] NC_021554, NC_016912, NC_022226, NC_022113

[0316] http://www.genome.jp/dbget-bin/www_bget?refseq+NC_017340

[0317] http://www.genome.jp/dbget-bin/www_bget?refseq+NC_010079

[0318] http://www.genome.jp/dbget-bin/www_bget?refseq+NC_022222

[0319] http://www.genome.jp/dbget-bin/www_bget?refseq+NC_021670

[0320] http://www.genome.jp/dbget-bin/www_bget?refseq+NC_017351

[0321] http://www.genome.jp/dbget-bin/www_bget?refseq+NC_002953

[0322] http://www.genome.jp/dbget-bin/www_bget?refseq+NC_017337

[0323] http://www.genome.jp/dbget-bin/www_bget?refseq+NC_018608

[0324] http://www.genome.jp/dbget-bin/www_bget?refseq+NC_007795

[0325] http://www.genome.jp/dbget-bin/www_bget?refseq+NC_021059

[0326] http://www.genome.jp/dbget-bin/www_bget?refseq+NC_021554

[0327] http://www.genome.jp/dbget-bin/www_bget?refseq+NC_016912

[0328] http://www.genome.jp/dbget-bin/www_bget?refseq+NC_022226

[0329] http://www.genome.jp/dbget-bin/www_bget?refseq+NC_022113

[0330] In Table 2, respectively Tables 2a and 2b, more than one annotation per SNP is possible for various positions with regard to the reference genomes for the following reason: the SNPs were annotated using all given finished genomes, thus a SNP may have multiple annotations even after the annotation aggregation, which was mentioned above. The reasons why a SNP may have more than one annotation after the aggregation can be as follows:
[0331] The gene products have very similar but not equal information, e.g. “potassium-transporting ATPase A chain” and “potassium-transporting ATPase subunit A”. In this case it may be not possible to apply a straightforward approach to remove such duplicates.

[0332] The annotations may differ in the genes/gene products, then it may be not possible not say which of the annotations is the correct one.

TABLE 2a
List of positions (corresponding to Table 1)

| No. | p-value (FDR) | GenomeName | fasta_header | SNPPositioninGenome | gene |
|---|---|---|---|---|---|
| 1 | 2,8455E−163 | 04_02981 | gi\|387149188\|ref\|NC_017340.11 | 534953 F | |
| | | USA300_TCH1516 | gi\|161508266\|ref\|NC_010079.11 | 543821 F | |
| 2 | 2,8455E−163 | 6850 | gi\|537441500\|ref\|NC_022222.11 | 210528 R | |
| | | 04_02981 | gi\|387149188\|ref\|NC_017340.11 | 267448 R | |
| | | USA300_TCH1516 | gi\|161508266\|ref\|NC_010079.11 | 269814 R | |
| 3 | 3,348E−163 | 04_02981 | gi\|387149188\|ref\|NC_017340.11 | 1362060 F | |
| 4 | 3,348E−163 | Bmb9393 | gi\|521210823\|ref\|NC_021670.11 | 1252703 R | |
| | | 11819_97 | gi\|385780298\|ref\|NC_017351.11 | 1520285 F | |
| | | 04_02981 | gi\|387149188\|ref\|NC_017340.11 | 1523326 F | |
| 5 | 3,5068E−163 | 04_02981 | gi\|387149188\|ref\|NC_017340.11 | 1619285 R | |
| | | USA300_TCH1516 | gi\|161508266\|ref\|NC_010079.11 | 1661238 R | |
| 6 | 4,5499E−163 | 04_02981 | gi\|387149188\|ref\|NC_017340.11 | 1641150 R | |
| 7 | 4,5499E−163 | MSSA476 | gi\|49484912\|ref\|NC_002953.31 | 170059 F | |
| | | ED133 | gi\|384546269\|ref\|NC_017337.11 | 142263 F | |
| 8 | 4,5499E−163 | 04_02981 | gi\|387149188\|ref\|NC_017340.11 | 517571 F | |
| | | 08BA02176 | gi\|404477334\|ref\|NC_018608.11 | 554542 F | |
| 9 | 6,182E−163 | 04_02981 | gi\|387149188\|ref\|NC_017340.11 | 978538 F | |
| 10 | 6,182E−163 | 04_02981 | gi\|387149188\|ref\|NC_017340.11 | 1434811 R | |
| 11 | 6,182E−163 | 6850 | gi\|537441500\|ref\|NC_022222.11 | 953696 R | |
| | | USA300_TCH1516 | gi\|161508266\|ref\|NC_010079.11 | 1010027 R | rluA1 |
| 12 | 6,182E−163 | 04_02981 | gi\|387149188\|ref\|NC_017340.11 | 208285 R | argC |
| | | NCTC_8325 | gi\|88193823\|ref\|NC_007795.11 | 161011 R | argC |
| 13 | 6,182E−163 | 11819_97 | gi\|385780298\|ref\|NC_017351.11 | 2179136 R | |
| | | 04_02981 | gi\|387149188\|ref\|NC_017340.11 | 2149064 R | |
| | | 08BA02176 | gi\|404477334\|ref\|NC_018608.11 | 2107689 R | |
| 14 | 6,182E−163 | 04_02981 | gi\|387149188\|ref\|NC_017340.11 | 2358535 F | |
| 15 | 6,182E−163 | 04_02981 | gi\|387149188\|ref\|NC_017340.11 | 2023012 R | |
| 16 | 6,182E−163 | NCTC_8325 | gi\|88193823\|ref\|NC_007795.11 | 2777211 F | |
| | | 04_02981 | gi\|387149188\|ref\|NC_017340.11 | 2779170 F | |
| 17 | 6,182E−163 | 08BA02176 | gi\|404477334\|ref\|NC_018608.11 | 1801995 R | |
| | | 04_02981 | gi\|387149188\|ref\|NC_017340.11 | 1790672 R | |
| 18 | 7,2093E−163 | 04_02981 | gi\|387149188\|ref\|NC_017340.11 | 976788 F | |
| | | NCTC_8325 | gi\|88193823\|ref\|NC_007795.11 | 878040 F | |
| 19 | 7,2093E−163 | Bmb9393 | gi\|521210823\|ref\|NC_021670.11 | 2101899 R | |
| | | 04_02981 | gi\|387149188\|ref\|NC_017340.11 | 1972149 R | |
| 20 | 1,1926E−162 | 6850 | gi\|537441500\|ref\|NC_022222.11 | 1875550 F | |
| | | USA300_TCH1516 | gi\|161508266\|ref\|NC_010079.11 | 2006001 F | bcp |
| | | 04_02981 | gi\|387149188\|ref\|NC_017340.11 | 1959494 F | |
| 21 | 1,2012E−162 | 04_02981 | gi\|387149188\|ref\|NC_017340.11 | 705667 R | |
| 22 | 1,2012E−162 | USA300_TCH1516 | gi\|161508266\|ref\|NC_010079.11 | 2268723 F | |
| | | 04_02981 | gi\|387149188\|ref\|NC_017340.11 | 2221448 F | |
| 23 | 1,2797E−162 | 04_02981 | gi\|387149188\|ref\|NC_017340.11 | 1814108 R | |
| 24 | 2,0719E−162 | 04_02981 | gi\|387149188\|ref\|NC_017340.11 | 531649 R | |
| | | 11819 97 | gi\|385780298\|ref\|NC_017351.11 | 531398 R | |
| 25 | 2,0719E−162 | 04_02981 | gi\|387149188\|ref\|NC_017340.11 | 1754561 F | |
| | | NCTC_8325 | gi\|88193823\|ref\|NC_007795.11 | 1691742 F | |
| 26 | 2,0719E−162 | 04_02981 | gi\|387149188\|ref\|NC_017340.11 | 1958403 R | |
| | | USA300_TCH1516 | gi\|161508266\|ref\|NC_010079.11 | 2004910 R | |
| 27 | 2,2505E−162 | 6850 | gi\|537441500\|ref\|NC_022222.11 | 1242653 R | |
| | | USA300_TCH1516 | gi\|161508266\|ref\|NC_010079.11 | 1294527 R | ribC |
| | | 04_02981 | gi\|387149188\|ref\|NC_017340.11 | 1299554 R | |
| 28 | 2,5515E−162 | 04_02981 | gi\|387149188\|ref\|NC_017340.11 | 2590222 R | |
| | | USA300_TCH1516 | gi\|161508266\|ref\|NC_010079.11 | 2637689 R | gntP |
| 29 | 8,302E−162 | USA300_TCH1516 | gi\|161508266\|ref\|NC_010079.11 | 1881161 R | fmtB1 |
| | | M1 | gi\|479328021\|ref\|NC_021059.11 | 1871101 R | |
| | | 6850 | gi\|537441500\|ref\|NC_022222.11 | 1759861 R | |
| | | 08BA02176 | gi\|404477334\|ref\|NC_018608.11 | 1855493 R | |
| | | CC45 | gi\|514064966\|ref\|NC_021554.11 | 1858794 R | |
| | | Bmb9393 | gi\|521210823\|ref\|NC_021670.11 | 1964828 R | |
| 30 | 1,7865E−161 | NCTC_8325 | gi\|88193823\|ref\|NC_007795.11 | 1050123 R | |
| | | 04_02981 | gi\|387149188\|ref\|NC_017340.11 | 1147277 R | |
| 31 | 9,7283E−147 | VC40 | gi\|379013365\|ref\|NC_016912.11 | 2005634 F | |
| | | 6850 | gi\|537441500\|ref\|NC_022222.11 | 2039052 F | |
| | | USA300_TCH1516 | gi\|161508266\|ref\|NC_010079.11 | 2187801 F | rsbU |
| 32 | 2,0972E−146 | 6850 | gi\|537441500\|ref\|NC_022222.11 | 350202 F | |
| | | 04_02981 | gi\|387149188\|ref\|NC_017340.11 | 402479 F | |
| | | NCTC_8325 | gi\|88193823\|ref\|NC_007795.11 | 352104 F | |
| 33 | 6,9539E−146 | M1 | gi\|479328021\|ref\|NC_021059.11 | 920768 F | rocD |
| | | 08BA02176 | gi\|404477334\|ref\|NC_018608.11 | 956878 F | rocD |
| | | 04_02981 | gi\|387149188\|ref\|NC_017340.11 | 956978 F | rocD |
| | | NCTC_8325 | gi\|88193823\|ref\|NC_007795.11 | 858255 F | rocD |
| 34 | 8,7237E−146 | 04_02981 | gi\|387149188\|ref\|NC_017340.11 | 1121847 R | |
| | | NCTC_8325 | gi\|88193823\|ref\|NC_007795.11 | 1024692 R | |
| 35 | 1,2342E−145 | 04_02981 | gi\|387149188\|ref\|NC_017340.11 | 429303 F | |
| 36 | 2,7651E−145 | USA300_TCH1516 | gi\|161508266\|ref\|NC_010079.11 | 1812380 R | dnaE2 |
| | | 04_02981 | gi\|387149188\|ref\|NC_017340.11 | 1775835 R | |
| | | NCTC_8325 | gi\|88193823\|ref\|NC_007795.11 | 1714993 R | |
| 37 | 2,9677E−145 | 04_02981 | gi\|387149188\|ref\|NC_017340.11 | 1928346 F | |
| 38 | 1,6935E−144 | CN1 | gi\|537459744\|ref\|NC_022226.11 | 1388095 R | |
| 39 | 1,7849E−144 | 04_02981 | gi\|387149188\|ref\|NC_017340.11 | 559072 R | |
| | | NCTC_8325 | gi\|88193823\|ref\|NC_007795.11 | 504007 R | |
| 40 | 1,8015E−144 | USA300_TCH1516 | gi\|161508266\|ref\|NC_010079.11 | 2719339 R | |
| | | 04_02981 | gi\|387149188\|ref\|NC_017340.11 | 2668764 R | |
| 41 | 4,3308E−144 | 04_02981 | gi\|387149188\|ref\|NC_017340.11 | 1124668 F | |
| | | USA300_TCH1516 | gi\|161508266\|ref\|NC_010079.11 | 1121585 F | |
| 42 | 5,541E−144 | CN1 | gi\|537459744\|ref\|NC_022226.11 | 158073 F | |
| | | M1 | gi\|479328021\|ref\|NC_021059.11 | 193628 F | |
| | | 6850 | gi\|537441500\|ref\|NC_022222.11 | 138357 F | |
| | | USA300_TCH1516 | gi\|161508266\|ref\|NC_010079.11 | 196480 F | |
| | | 04_02981 | gi\|387149188\|ref\|NC_017340.11 | 189192 F | |
| 43 | 6,1938E−144 | 04_02981 | gi\|387149188\|ref\|NC_017340.11 | 1187805 F | |
| | | 55 2053 | gi\|532358222\|ref\|NC_022113.11 | 1078815 F | |
| | | USA300_TCH1516 | gi\|161508266\|ref\|NC_010079.11 | 1182930 F | |
| 44 | 1,7019E−143 | USA300_TCH1516 | gi\|161508266\|ref\|NC_010079.11 | 1376396 R | sbcC |
| | | 6850 | gi\|537441500\|ref\|NC_022222.11 | 1323236 R | |
| | | CN1 | gi\|537459744\|ref\|NC_022226.11 | 1315892 R | |
| | | 04_02981 | gi\|387149188\|ref\|NC_017340.11 | 1379143 R | |
| | | Bmb9393 | gi\|521210823\|ref\|NC_021670.11 | 1399306 F | |
| 45 | 2,694E−143 | 04_02981 | gi\|387149188\|ref\|NC_017340.11 | 2398505 R | |
| 46 | 3,3496E−143 | 04_02981 | gi\|387149188\|ref\|NC_017340.11 | 2753541 F | |
| | | USA300_TCH1516 | gi\|161508266\|ref\|NC_010079.11 | 2803165 F | |
| 47 | 3,5029E−143 | 04_02981 | gi\|387149188\|ref\|NC_017340.11 | 1415365 R | |
| | | 08BA02176 | gi\|404477334\|ref\|NC_018608.11 | 1428821 R | |
| | | NCTC_8325 | gi\|88193823\|ref\|NC__007795.11 | 1318646 R | |
| | | USA300_TCH1516 | gi\|161508266\|ref\|NC_010079.11 | 1412563 R | femB |
| | | M1 | gi\|479328021\|ref\|NC_021059.11 | 1381147 R | |
| 48 | 3,5029E−143 | 04_02981 | gi\|387149188\|ref\|NC_017340.11 | 1678734 R | |
| | | USA300_TCH1516 | gi\|161508266\|ref\|NC_010079.11 | 1720315 R | |
| 49 | 8,2809E−143 | NCTC_8325 | gi\|88193823\|ref\|NC_007795.11 | 854815 R | |
| | | 04_02981 | gi\|387149188\|ref\|NC_017340.11 | 953539 R | |
| | | USA300_TCH1516 | gi\|161508266\|ref\|NC_010079.11 | 948900 R | prsA1 |
| 50 | 8,2809E−143 | 04_02981 | gi\|387149188\|ref\|NC_017340.11 | 1675156 R | |

TABLE 2b
list of positions (corresponding to Table 1,_continued)

| No. | Amino Acids | Codons | GenomeGI | Protein_GI |
|---|---|---|---|---|
| 1 | F_L | TTA_TTT | 387149188 | 446874184 |
| | F_L | TTA_TTT | 161508266 | 161508745 |
| 2 | A_V | GCA_GTA | 537441500 | 537465126 |
| | A_V | GCA_GTA | 387149188 | 447077358 |
| | A_V | GCA_GTA | 161508266 | 161508491 |
| 3 | I_N | AAT_ATT | 387149188 | 447178207 |
| 4 | L_S | TCA_TTA | 521210823 | 521258120 |
| | L_S | TCA_TTA | 385780298 | 446060496 |
| | L_S | TCA_TTA | 387149188 | 446060495 |
| 5 | N_S | AAT_AGT | 387149188 | 446940596 |
| | N_S | AAT_AGT | 161508266 | 161509778 |
| 6 | E_K | AAA_GAA | 387149188 | 446032753 |
| 7 | G_R | AGA_GGA | 49484912 | 487756815 |
| | G_R | AGA_GGA | 384546269 | 446093782 |
| 8 | K_R | AAA_AGA | 387149188 | 446973880 |
| | K_R | AAA_AGA | 404477334 | 446973883 |
| 9 | I_M | ATC_ATG | 387149188 | 446312722 |
| 10 | A_S | GCA_TCA | 387149188 | 446180863 |
| 11 | L_P | CCT_CTT | 537441500 | 537465549 |
| | L_P | CCT_CTT | 161508266 | 161509205 |
| 12 | K_T | AAA_ACA | 387149188 | 446556386 |
| | K_T | AAA_ACA | 88193823 | 88193961 |
| 13 | M_V | ATG_GTG | 385780298 | 446324804 |
| | M_V | ATG_GTG | 387149188 | 446324797 |
| | M_V | ATG_GTG | 404477334 | 446324791 |
| 14 | K_N | AAA_AAC | 387149188 | 445930822 |
| 15 | E_V | GAA_GTA | 387149188 | 446943955 |
| 16 | F_L | TTG_TTT | 88193823 | 88196623 |
| | F_L | TTG_TTT | 387149188 | 446800117 |
| 17 | Q_R | CAG_CGG | 404477334 | 446795417 |
| | Q_R | CAG_CGG | 387149188 | 446795407 |
| 18 | F_L | TTA_TTT | 387149188 | 447047252 |
| | F_L | TTA_TTT | 88193823 | 88194665 |
| 19 | M_V | ATG_GTG | 521210823 | 752533903 |
| | M_V | ATG_GTG | 387149188 | 446753128 |
| 20 | D_Y | GAT_TAT | 537441500 | 537465893 |
| | D_Y | GAT_TAT | 161508266 | 161510081 |
| | D_Y | GAT_TAT | 387149188 | 446862272 |
| 21 | E_K | AAG_GAG | 387149188 | 446725640 |
| 22 | L_S | TCA_TTA | 161508266 | 161510359 |
| | L_S | TCA_TTA | 387149188 | 446293068 |
| 23 | A_V | GCG_GTG | 387149188 | 446784840 |
| 24 | N_T | AAT_ACT | 387149188 | 446076361 |
| | N_T | AAT_ACT | 385780298 | 446076373 |
| 25 | L_V | GTA_TTA | 387149188 | 446028277 |
| | L_V | GTA_TTA | 88193823 | 88195494 |
| 26 | A_T | ACA_GCA | 387149188 | 446792191 |
| | A_T | ACA_GCA | 161508266 | 161510080 |
| 27 | I_T | ACC_ATC | 537441500 | 537465687 |
| | I_T | ACC_ATC | 161508266 | 161509438 |
| | IT | ACC_ATC | 387149188 | 446786934 |
| 28 | K T | AAA_ACA | 387149188 | 446403560 |
| | K T | AAA_ACA | 161508266 | 161510698 |
| 29 | K T | AAG_ACG | 161508266 | 161509974 |
| | K T | AAG_ACG | 479328021 | 505394769 |
| | K T | AAG_ACG | 537441500 | 537465850 |
| | K T | AAG_ACG | 404477334 | 446973259 |
| | K T | AAG_ACG | 514064966 | 514074897 |
| | K T | AAG_ACG | 521210823 | 521258173 |
| 30 | F_L | TTA_TTT | 88193823 | 88194836 |
| | F_L | TTA_TTT | 387149188 | 446593607 |
| 31 | I_V | ATA_GTA | 379013365 | 487720346 |
| | I_V | ATA_GTA | 537441500 | 537465949 |
| | I_V | ATA_GTA | 161508266 | 161510279 |
| 32 | K_T | AAA_ACA | 537441500 | 537465192 |
| | K_T | AAA_ACA | 387149188 | 446129782 |
| | K_T | AAA_ACA | 88193823 | 88194138 |
| 33 | E_K | AAA_GAA | 479328021 | 505394709 |
| | E_K | AAA_GAA | 404477334 | 446089469 |
| | E_K | AAA_GAA | 387149188 | 446089454 |
| | E_K | AAA_GAA | 88193823 | 88194651 |
| 34 | I_T | ACA_ATA | 387149188 | 446104798 |
| | I_T | ACA_ATA | 88193823 | 88194808 |
| 35 | G_V | GGA_GTA | 387149188 | 446343556 |
| 36 | D_E | GAA_GAT | 161508266 | 161509916 |
| | D_E | GAA_GAT | 387149188 | 446149063 |
| | D_E | GAA_GAT | 88193823 | 88195511 |
| 37 | A_G | GCA_GGA | 387149188 | 446506832 |
| 38 | C_Y | TAT_TGT | 537459744 | 686312170 |
| 39 | A_V | GCC_GTC | 387149188 | 446804811 |
| | A_V | GCC_GTC | 88193823 | 88194284 |
| 40 | P_T | ACA_CCA | 161508266 | 161510779 |
| | P_T | ACA_CCA | 387149188 | 446083969 |
| 41 | I_L | ATA_TTA | 387149188 | 446710589 |
| | I_L | ATA_TTA | 161508266 | 161509291 |
| 42 | I_V | ATT_GTT | 537459744 | 537467717 |
| | I_V | ATT_GTT | 479328021 | 505394663 |
| | I_V | ATT_GTT | 537441500 | 537465062 |
| | I_V | ATT_GTT | 161508266 | 161508437 |
| | I_V | ATT_GTT | 387149188 | 446513509 |
| 43 | I_T | ACA_ATA | 387149188 | 446462960 |
| | I_T | ACA_ATA | 532358222 | 532479591 |
| | I_T | ACA_ATA | 161508266 | 161509351 |
| 44 | I_T | ACT_ATT | 161508266 | 161509514 |
| | I_T | ACT_ATT | 537441500 | 537465718 |
| | I_T | ACT_ATT | 537459744 | 537467986 |
| | I_T | ACT_ATT | 387149188 | 446725826 |
| | I_T | ACT_ATT | 521210823 | 521258127 |
| 45 | G_S | AGT_GGT | 387149188 | 446921498 |
| 46 | S_Y | TAT_TCT | 387149188 | 446080575 |
| | S_Y | TAT_TCT | 161508266 | 161510854 |
| 47 | L_S | TCA_TTA | 387149188 | 446595763 |
| | L_S | TCA_TTA | 404477334 | 446595752 |
| | L_S | TCA_TTA | 88193823 | 88195101 |
| | L_S | TCA_TTA | 161508266 | 161509542 |
| | L_S | TCA_TTA | 479328021 | 505394733 |
| 48 | I_L | ATT_CTT | 387149188 | 446059917 |
| | I_L | ATT_CTT | 161508266 | 161509840 |
| 49 | A_V | GCA_GTA | 88193823 | 88194648 |
| | A_V | GCA_GTA | 387149188 | 445957208 |
| | A_V | GCA_GTA | 161508266 | 161509155 |
| 50 | D_N | AAT_GAT | 387149188 | 446305320 |

[0333] In Table 2, respectively Tables 2a and 2b, the annotations obtained by the analysis contain the following information:
[0334] No.: consecutive number
[0335] p-value (FDR): significance value calculated for MRSA-MSSA using Fishers exact test and adjusted by FDR (Benjamini Hochberg method (Benjamini Hochberg, 1995))
[0336] GenomeName: Name of the reference genome used for the annotation
[0337] fasta_header: Header of the reference genome fasta file (including GI and NCBI RefSeq ID)
[0338] SNPPositioninGenome: SNP position in the reference genome (F=forward; R=reverse)
[0339] AminoAcids: Amino acids coded by the codon in which the SNP occurs (only one value for synonymous SNPs, otherwise at least 2), separated by “_”
[0340] Codons: All found codons for the SNP, separated by “_”
[0341] GenomeGI: GI number of the genome sequence
[0342] Protein_GI: GI number of the protein sequence
[0343] gene: gene symbol (if applicable)
[0344] product: Gene product
[0345] protein_id: GenBank accession of the protein

[0346] Further, in Table 2, all SNP are non-synonymous (1=yes, 0=no), and the SNPs lie within a coding region (are “OnProtein”)

[0347] The p-value was calculated using the Fisher exact test based on contingency table with 4 fields: #samples Resistant/wild type; #samples Resistant/mutant; #samples not Resistant/wild type; #samples not Resistant/mutant

[0348] The test is based on the distribution of the samples in the 4 fields. Even distribution indicates no significance, while clustering into two fields indicates significance.

[0349] The following results were obtained
[0350] A total of 7.101 non-synonymous SNPs associated with the MRSA/MSSA phenotypes (FDR adjusted p-value<10⁻⁹) was detected.
[0351] The biggest part of these were point mutations (i.e. single base exchanges)
[0352] The highest significance reached was <3*10⁻¹⁶³.

### Example 2

### Determination of Genetic Resistance Profile

[0353] The same bacteria used in Example 1, i.e. the cohort of 1001 specimens of S. aureus, were used in Example 2. Of those 985 had an assembly, a unique Kiel NGS ID (NGS data and assembly ID, a unique resistance profile (no different resistance profiles with different outcomes, and at least one drug with non-missing resistance value, so that these were further analyzed. The experiments were carried out as in Example 1, except that instead of a determination of Methicillin resistance/susceptibility, resistance/susceptibility was determined for the following antibiotics as described below: Amoxicillin/Clavulanate, Ampicillin, Ampicillin/Sulbactam, Azithromycin, Cefalothin, Cefazolin, Cefepime, Cefotaxime, Cefoxitin, Ceftriaxone, Cefuroxime, Chloramphenicol, Ciprofloxacin, Clindamycin, Daptomycin, Ertapenem, Erythromycin, Fosfomycin, Fusidic acid, Gentamicin, Imipenem, Levofloxacin, Linezolid, Meropenem, Moxifloxacin, Mupirocin, Nitrofurantoin, Norfloxacin, Ofloxacin, Oxacillin, Penicillin G, Piperacillin/Tazobactam, Quinupristin/Dalfopristin, Rifampicin, Teicoplanin, Tetracycline, Tigecycline, Tobramycin, Trimethoprim/Sulfamethoxazole, and Vancomycin.

[0354] For testing, standard procedures were used, i.e. VITEK 2 system and AST cards (Biomerieux), Microscan system and AST panels (Beckmann Coulter).

[0355] Data analysis was carried out as in Example 1.

[0356] For the resistance profiles only drugs with non-missing daga for at least 10% of the samples were kept, so that only 16 drugs remained: Ampicillin, Ampicillin/Sulbactam, Cefepime, Cefotaxime, Cefuroxime, Ciprofloxacin, Clindamycin, Erythromycin, Imipenem, Levofloxacin, Moxifloxacin, Oxacillin, Penicillin G, Piperacillin/Tazobactam, Tetracycline, and Tobramycin.

[0357] From the data, first the 50 genes with the best p-value were chosen for the list of mutations as well as the list of correlated antibiotic resistance, representing Tables 3a and 3b.

[0358] For correlation, the data was filtered by the following drug class ratio and the annotation product:

$$drugclassratio = \frac{numberofsignificantdrugsofthatclass}{numberoftesteddrugsofthatclass}$$

[0359] The genes in Table 3a thereby represent the 50 best genes for which a mutation was observed in the genomes of S. aureus, whereas the genes in Table 3b represent the 50 best genes for which a cross-correlation could be observed for the antimicrobial drug, e.g. antibiotic, susceptibility testing. Details for Table 3a are given in Tables 4a-d, and details for Tables 3b in Tables 4e-h. The found reference genomes were as in Example 1.

TABLE 4a
List of positions (corresponding to Table 3a)

| No. | position | reference genome | genome name | sign_phenos | sign_phenos_class |
|---|---|---|---|---|---|
| 1 | 1958403 R | NC_017340.1 | 04_02981 | Ampicillin/Sulbactam;Cefepime;Cefotaxim; | aminoglycoside; |
| | 2004910 R | NC_010079.1 | USA300_TCH1516 | Cefuroxim;Ciprofloxacin;Clindamycin; | fluoroquinolone; |
| | | | | Erythromycin;Imipenem;Levofloxacin; | lactam; lincosa- |
| | | | | Moxifloxacin;Oxacillin;Penicillin | mide;macrolide |
| | | | | G;Tobramycin | |
| 2 | 1641150 R | NC_017340.1 | 04_02981 | Ampicillin/Sulbactam;Cefepime;Cefotaxim; | aminoglycoside; |
| | | | | Cefuroxim;Ciprofloxacin;Clindamycin; | fluoroquinolone; |
| | | | | Erythromycin;Imipenem;Levofloxacin; | lactam; lincosa- |
| | | | | Moxifloxacin;Oxacillin;Penicillin | mide;macrolide |
| | | | | G;Tobramycin | |
| 3 | 978538 F | NC_017340.1 | 04_02981 | Ampicillin/Sulbactam;Cefepime;Cefotaxim; | aminoglycoside; |
| | | | | Cefuroxim;Ciprofloxacin;Clindamycin; | fluoroquinolone; |
| | | | | Erythromycin;Imipenem;Levofloxacin; | lactam; lincosa- |
| | | | | Moxifloxacin;Oxacillin;Penicillin | mide;macrolide |
| | | | | G;Tobramycin | |
| 4 | 705667 R | NC_017340.1 | 04_02981 | Ampicillin/Sulbactam;Cefepime;Cefotaxim; | aminoglycoside; |
| | | | | Cefuroxim;Ciprofloxacin;Clindamycin; | fluoroquinolone; |
| | | | | Erythromycin;Imipenem;Levofloxacin; | lactam; lincosa- |
| | | | | Moxifloxacin;Oxacillin;Penicillin | mide;macrolide |
| | | | | G;Tobramycin | |
| 5 | 1434811 R | NC_017340.1 | 04_02981 | Ampicillin/Sulbactam;Cefepime;Cefotaxim; | aminoglycoside; |
| | | | | Cefuroxim;Ciprofloxacin;Clindamycin; | fluoroquinolone; |
| | | | | Erythromycin;Imipenem;Levofloxacin; | lactam; lincosa- |
| | | | | Moxifloxacin;Oxacillin;Penicillin | mide;macrolide |
| | | | | G;Tobramycin | |
| 6 | 953696 R | NC_022222.1 | 6850 | Ampicillin/Sulbactam;Cefepime;Cefotaxim; | aminoglycoside; |
| | 1010027 R | NC_010079.1 | USA300_TCH1516 | Cefuroxim;Ciprofloxacin;Clindamycin; | fluoroquinolone; |
| | | | | Erythromycin;Imipenem;Levofloxacin; | lactam; lincosa- |
| | | | | Moxifloxacin;Oxacillin;Penicillin | mide;macrolide |
| | | | | G;Tobramycin | |
| 7 | 2101899 R | NC_021670.1 | Bmb9393 | Ampicillin/Sulbactam;Cefepime;Cefotaxim; | aminoglycoside; |
| | 1972149 R | NC_017340.1 | 04_02981 | Cefuroxim;Ciprofloxacin;Clindamycin; | fluoroquinolone; |
| | | | | Erythromycin;Imipenem;Levofloxacin; | lactam; lincosa- |
| | | | | Moxifloxacin;Oxacillin;Penicillin | mide;macrolide |
| | | | | G;Tobramycin | |
| 8 | 208285 R | NC_017340.1 | 04_02981 | Ampicillin/Sulbactam;Cefepime;Cefotaxim; | aminoglycoside; |
| | 161011 R | NC_007795.1 | NCTC_8325 | Cefuroxim;Ciprofloxacin;Clindamycin; | fluoroquinolone; |
| | | | | Erythromycin;Imipenem;Levofloxacin; | lactam; lincosa- |
| | | | | Moxifloxacin;Oxacillin;Penicillin | mide;macrolide |
| | | | | G;Tobramycin | |
| 9 | 2179136 R | NC_017351.1 | 11819 97 | Ampicillin/Sulbactam;Cefepime;Cefotaxim; | aminoglycoside; |
| | 2149064 R | NC_017340.1 | 04_02981 | Cefuroxim;Ciprofloxacin;Clindamycin; | fluoroquinolone; |
| | 2107689 R | NC_018608.1 | 08BA02176 | Erythromycin;Imipenem;Levofloxacin; | lactam; lincosa- |
| | | | | Moxifloxacin;Oxacillin;Penicillin | mide;macrolide |
| | | | | G;Tobramycin | |
| 10 | 2358535 F | NC_017340.1 | 04_02981 | Ampicillin/Sulbactam;Cefepime;Cefotaxim; | aminoglycoside; |
| | | | | Cefuroxim;Ciprofloxacin;Clindamycin; | fluoroquinolone; |
| | | | | Erythromycin;Imipenem;Levofloxacin; | lactam; lincosa- |
| | | | | Moxifloxacin;Oxacillin;Penicillin | mide;macrolide |
| | | | | G;Tobramycin | |
| 11 | 2023012 R | NC_017340.1 | 04_02981 | Ampicillin/Sulbactam;Cefepime;Cefotaxim; | aminoglycoside; |
| | | | | Cefuroxim;Ciprofloxacin;Clindamycin; | fluoroquinolone; |
| | | | | Erythromycin;Imipenem;Levofloxacin; | lactam; lincosa- |
| | | | | Moxifloxacin;Oxacillin;Penicillin | mide;macrolide |
| | | | | G;Tobramycin | |
| 12 | 2777211 F | NC_007795.1 | NCTC_8325 | Ampicillin/Sulbactam;Cefepime;Cefotaxim; | aminoglycoside; |
| | 2779170 F | NC_017340.1 | 04_02981 | Cefuroxim;Ciprofloxacin;Clindamycin; | fluoroquinolone; |
| | | | | Erythromycin;Imipenem;Levofloxacin; | lactam; lincosa- |
| | | | | Moxifloxacin;Oxacillin;Penicillin | mide;macrolide |
| | | | | G;Tobramycin | |
| 13 | 1801995 R | NC_018608.1 | 08BA02176 | Ampicillin/Sulbactam;Cefepime;Cefotaxim; | aminoglycoside; |
| | 1790672 R | NC_017340.1 | 04_02981 | Cefuroxim;Ciprofloxacin;Clindamycin; | fluoroquinolone; |
| | | | | Erythromycin;Imipenem;Levofloxacin; | lactam; lincosa- |
| | | | | Moxifloxacin;Oxacillin;Penicillin | mide;macrolide |
| | | | | G;Tobramycin | |
| 14 | 1754561 F | NC_017340.1 | 04_02981 | Ampicillin/Sulbactam;Cefepime;Cefotaxim; | aminoglycoside; |
| | 1691742 F | NC_007795.1 | NCTC_8325 | Cefuroxim;Ciprofloxacin;Clindamycin; | fluoroquinolone; |
| | | | | Erythromycin;Imipenem;Levofloxacin; | lactam; lincosa- |
| | | | | Moxifloxacin;Oxacillin;Penicillin | mide;macrolide |
| | | | | G;Tobramycin | |
| 15 | 1362060 F | NC_017340.1 | 04_02981 | Ampicillin/Sulbactam;Cefepime;Cefotaxim; | aminoglycoside; |
| | | | | Cefuroxim;Ciprofloxacin;Clindamycin; | fluoroquinolone; |
| | | | | Erythromycin;Imipenem;Levofloxacin; | lactam; lincosa- |
| | | | | Moxifloxacin;Oxacillin;Penicillin | mide;macrolide |
| | | | | G;Tobramycin | |
| 16 | 1242653 R | NC_022222.1 | 6850 | Ampicillin/Sulbactam;Cefepime;Cefotaxim; | aminoglycoside; |
| | 1294527 R | NC_010079.1 | USA300_TCH1516 | Cefuroxim;Ciprofloxacin;Clindamycin; | fluoroquinolone; |
| | 1299554 R | NC_017340.1 | 04_02981 | Erythromycin;Imipenem;Levofloxacin; | lactam; lincosa- |
| | | | | Moxifloxacin;Oxacillin;Penicillin | mide;macrolide |
| | | | | G;Tobramycin | |
| 17 | 1252703 R | NC_021670.1 | Bmb9393 | Ampicillin/Sulbactam;Cefepime;Cefotaxim; | aminoglycoside; |
| | 1520285 F | NC_017351.1 | 11819 97 | Cefuroxim;Ciprofloxacin;Clindamycin; | fluoroquinolone; |
| | 1523326 F | NC_017340.1 | 04_02981 | Erythromycin;Imipenem;Levofloxacin; | lactam; lincosa- |
| | | | | Moxifloxacin;Oxacillin;Penicillin | mide;macrolide |
| | | | | G;Tobramycin | |
| 18 | 1619285 R | NC_017340.1 | 04_02981 | Ampicillin/Sulbactam;Cefepime;Cefotaxim; | aminoglycoside; |
| | 1661238 R | NC_010079.1 | USA300_TCH1516 | Cefuroxim;Ciprofloxacin;Clindamycin; | fluoroquinolone; |
| | | | | Erythromycin;Imipenem;Levofloxacin; | lactam; lincosa- |
| | | | | Moxifloxacin;Oxacillin;Penicillin | mide;macrolide |
| | | | | G;Tobramycin | |
| 19 | 1875550 F | NC_022222.1 | 6850 | Ampicillin/Sulbactam;Cefepime;Cefotaxim; | aminoglycoside; |
| | 2006001 F | NC_010079.1 | USA300_TCH1516 | Cefuroxim;Ciprofloxacin;Clindamycin; | fluoroquinolone; |
| | 1959494 F | NC_017340.1 | 04_02981 | Erythromycin;Imipenem;Levofloxacin; | lactam; lincosa- |
| | | | | Moxifloxacin;Oxacillin;Penicillin | mide;macrolide |
| | | | | G;Tobramycin | |
| 20 | 976788 F | NC_017340.1 | 04_02981 | Ampicillin/Sulbactam;Cefepime;Cefotaxim; | aminoglycoside; |
| | 878040 F | NC_007795.1 | NCTC_8325 | Cefuroxim;Ciprofloxacin;Clindamycin; | fluoroquinolone; |
| | | | | Erythromycin;Imipenem;Levofloxacin; | lactam; lincosa- |
| | | | | Moxifloxacin;Oxacillin;Penicillin | mide;macrolide |
| | | | | G;Tobramycin | |
| 21 | 2590222 R | NC_017340.1 | 04_02981 | Ampicillin/Sulbactam;Cefepime;Cefotaxim; | aminoglycoside; |
| | 2637689 R | NC_010079.1 | USA300_TCH1516 | Cefuroxim;Ciprofloxacin;Clindamycin; | fluoroquinolone; |
| | | | | Erythromycin;Imipenem;Levofloxacin; | lactam; lincosa- |
| | | | | Moxifloxacin;Oxacillin;Penicillin | mide;macrolide |
| | | | | G;Tobramycin | |
| 22 | 210528 R | NC_022222.1 | 6850 | Ampicillin/Sulbactam;Cefepime;Cefotaxim; | aminoglycoside; |
| | 267448 R | NC_017340.1 | 04_02981 | Cefuroxim;Ciprofloxacin;Clindamycin; | fluoroquinolone; |
| | 269814 R | NC_010079.1 | USA300_TCH1516 | Erythromycin;Imipenem;Levofloxacin; | lactam; lincosa- |
| | | | | Moxifloxacin;Oxacillin;Penicillin | mide;macrolide |
| | | | | G;Tobramycin | |
| 23 | 1814108 R | NC_017340.1 | 04_02981 | Ampicillin/Sulbactam;Cefepime;Cefotaxim; | aminoglycoside; |
| | | | | Cefuroxim;Ciprofloxacin;Clindamycin; | fluoroquinolone; |
| | | | | Erythromycin;Imipenem;Levofloxacin; | lactam; lincosa- |
| | | | | Moxifloxacin;Oxacillin;Penicillin | mide;macrolide |
| | | | | G;Tobramycin | |
| 24 | 170059 F | NC_002953.3 | MSSA476 | Ampicillin/Sulbactam;Cefepime;Cefotaxim; | aminoglycoside; |
| | 142263 F | NC_017337.1 | ED133 | Cefuroxim;Ciprofloxacin;Clindamycin; | fluoroquinolone; |
| | | | | Erythromycin;Imipenem;Levofloxacin; | lactam; lincosa- |
| | | | | Moxifloxacin;Oxacillin;Penicillin | mide;macrolide |
| | | | | G;Tobramycin | |
| 25 | 534953 F | NC_017340.1 | 04_02981 | Ampicillin/Sulbactam;Cefepime;Cefotaxim; | aminoglycoside; |
| | 543821 F | NC_010079.1 | USA300_TCH1516 | Cefuroxim;Ciprofloxacin;Clindamycin; | fluoroquinolone; |
| | | | | Erythromycin;Imipenem;Levofloxacin; | lactam; lincosa- |
| | | | | Moxifloxacin;Oxacillin;Penicillin | mide;macrolide |
| | | | | G;Tobramycin | |
| 26 | 517571 F | NC_017340.1 | 04_02981 | Ampicillin/Sulbactam;Cefepime;Cefotaxim; | aminoglycoside; |
| | 554542 F | NC_018608.1 | 08BA02176 | Cefuroxim;Ciprofloxacin;Clindamycin; | fluoroquinolone; |
| | | | | Erythromycin;Imipenem;Levofloxacin; | lactam; lincosa- |
| | | | | Moxifloxacin;Oxacillin;Penicillin | mide;macrolide |
| | | | | G;Tobramycin | |
| 27 | 531649 R | NC_017340.1 | 04_02981 | Ampicillin/Sulbactam;Cefepime;Cefotaxim; | aminoglycoside; |
| | 531398 R | NC_017351.1 | 11819_97 | Cefuroxim;Ciprofloxacin;Clindamycin; | fluoroquinolone; |
| | | | | Erythromycin;Imipenem;Levofloxacin; | lactam; lincosa- |
| | | | | Moxifloxacin;Oxacillin;Penicillin | mide;macrolide |
| | | | | G;Tobramycin | |
| 28 | 1050123 R | NC_007795.1 | NCTC_8325 | Ampicillin/Sulbactam;Cefepime;Cefotaxim; | aminoglycoside; |
| | 1147277 R | NC_017340.1 | 04_02981 | Cefuroxim;Ciprofloxacin;Clindamycin; | fluoroquinolone; |
| | | | | Erythromycin;Imipenem;Levofloxacin; | lactam; lincosa- |
| | | | | Moxifloxacin;Oxacillin;Penicillin | mide;macrolide |
| | | | | G;Tobramycin | |
| 29 | 1881161 R | NC_010079.1 | USA300_TCH1516 | Ampicillin/Sulbactam;Cefepime;Cefotaxim; | aminoglycoside; |
| | 1871101 R | NC_021059.1 | M1 | Cefuroxim;Ciprofloxacin;Clindamycin; | fluoroquinolone; |
| | | | | Erythromycin;Imipenem;Levofloxacin; | lactam; lincosa- |
| | 1759861 R | NC_022222.1 | 6850 | Moxifloxacin;Oxacillin;Penicillin | mide;macrolide |
| | 1855493 R | NC_018608.1 | 08BA02176 | G;Tobramycin | |
| | 1858794 R | NC_021554.1 | CC45 | | |
| | 1964828 R | NC_021670.1 | Bmb9393 | | |
| 30 | 2268723 F | NC_010079.1 | USA300_TCH1516 | Ampicillin/Sulbactam;Cefepime;Cefotaxim; | aminoglycoside; |
| | 2221448 F | NC_017340.1 | 04_02981 | Cefuroxim;Ciprofloxacin;Clindamycin; | fluoroquinolone; |
| | | | | Erythromycin;Imipenem;Levofloxacin; | lactam; lincosa- |
| | | | | Moxifloxacin;Oxacillin;Penicillin | mide;macrolide |
| | | | | G;Tobramycin | |
| 31 | 920768 F | NC_021059.1 | M1 | Ampicillin/Sulbactam;Cefepime;Cefotaxim; | aminoglycoside; |
| | 956878 F | NC_018608.1 | 08BA02176 | Cefuroxim;Ciprofloxacin;Clindamycin; | fluoroquinolone; |
| | 956978 F | NC_017340.1 | 04_02981 | Erythromycin;Imipenem;Levofloxacin; | lactam; lincosa- |
| | 858255 F | NC_007795.1 | NCTC_8325 | Moxifloxacin;Oxacillin;Penicillin | mide;macrolide |
| | | | | G;Tobramycin | |
| 32 | 2005634 F | NC_016912.1 | VC40 | Ampicillin/Sulbactam;Cefepime;Cefotaxim; | aminoglycoside; |
| | 2039052 F | NC_022222.1 | 6850 | Cefuroxim;Ciprofloxacin;Clindamycin; | fluoroquinolone; |
| | 2187801 F | NC_010079.1 | USA300_TCH1516 | Erythromycin;Imipenem;Levofloxacin; | lactam; lincosa- |
| | | | | Moxifloxacin;Oxacillin;Penicillin | mide;macrolide |
| | | | | G;Tobramycin | |
| 33 | 429303 F | NC_017340.1 | 04_02981 | Ampicillin/Sulbactam;Cefepime;Cefotaxim; | aminoglycoside; |
| | | | | Cefuroxim;Ciprofloxacin;Clindamycin; | fluoroquinolone; |
| | | | | Erythromycin;Imipenem;Levofloxacin; | lactam; lincosa- |
| | | | | Moxifloxacin;Oxacillin;Penicillin | mide;macrolide |
| | | | | G;Tobramycin | |
| 34 | 350202 F | NC_022222.1 | 6850 | Ampicillin/Sulbactam;Cefepime;Cefotaxim; | aminoglycoside; |
| | 402479 F | NC_017340.1 | 04_02981 | Cefuroxim;Ciprofloxacin;Clindamycin; | fluoroquinolone; |
| | 352104 F | NC_007795.1 | NCTC_8325 | Erythromycin;Imipenem;Levofloxacin; | lactam; lincosa- |
| | | | | Moxifloxacin;Oxacillin;Penicillin | mide;macrolide |
| | | | | G;Tobramycin | |
| 35 | 158073 F | NC_022226.1 | CN1 | Ampicillin/Sulbactam;Cefepime;Cefotaxim; | aminoglycoside; |
| | 193628 F | NC_021059.1 | M1 | Cefuroxim;Ciprofloxacin;Clindamycin; | fluoroquinolone; |
| | 138357 F | NC_022222.1 | 6850 | Erythromycin;Imipenem;Levofloxacin; | lactam; lincosa- |
| | 196480 F | NC_010079.1 | USA300_TCH1516 | Moxifloxacin;Oxacillin;Penicillin | mide;macrolide |
| | 189192 F | NC_017340.1 | 04_02981 | G;Tobramycin | |
| 36 | 1121847 R | NC_017340.1 | 04_02981 | Ampicillin/Sulbactam;Cefepime;Cefotaxim; | aminoglycoside; |
| | 1024692 R | NC_007795.1 | NCTC_8325 | Cefuroxim;Ciprofloxacin;Clindamycin; | fluoroquinolone; |
| | | | | Erythromycin;Imipenem;Levofloxacin; | lactam; lincosa- |
| | | | | Moxifloxacin;Oxacillin;Penicillin | mide;macrolide |
| | | | | G;Tobramycin | |
| 37 | 2719339 R | NC_010079.1 | USA300_TCH1516 | Ampicillin/Sulbactam;Cefepime;Cefotaxim; | aminoglycoside; |
| | 2668764 R | NC_017340.1 | 04_02981 | Cefuroxim;Ciprofloxacin;Clindamycin; | fluoroquinolone; |
| | | | | Erythromycin;Imipenem;Levofloxacin; | lactam; lincosa- |
| | | | | Moxifloxacin;Oxacillin;Penicillin | mide;macrolide |
| | | | | G;Tobramycin | |
| 38 | 1388095 R | NC_022226.1 | CN1 | Ampicillin/Sulbactam;Cefepime;Cefotaxim; | aminoglycoside; |
| | | | | Cefuroxim;Ciprofloxacin;Clindamycin; | fluoroquinolone; |
| | | | | Erythromycin;Imipenem;Levofloxacin; | lactam; lincosa- |
| | | | | Moxifloxacin;Oxacillin;Penicillin | mide;macrolide |
| | | | | G;Tobramycin | |
| 39 | 1415365 R | NC_017340.1 | 04_02981 | Ampicillin/Sulbactam;Cefepime;Cefotaxim; | aminoglycoside; |
| | 1428821 R | NC_018608.1 | 08BA02176 | Cefuroxim;Ciprofloxacin;Clindamycin; | fluoroquinolone; |
| | 1318646 R | NC_007795.1 | NCTC_8325 | Erythromycin;Imipenem;Levofloxacin; | lactam; lincosa- |
| | 1412563 R | NC_010079.1 | USA300_TCH1516 | Moxifloxacin;Oxacillin;Penicillin | mide;macrolide |
| | 1381147 R | NC_021059.1 | M1 | G;Tobramycin | |
| 40 | 1678734 R | NC_017340.1 | 04_02981 | Ampicillin/Sulbactam;Cefepime;Cefotaxim; | aminoglycoside; |
| | 1720315 R | NC_010079.1 | USA300_TCH1516 | Cefuroxim;Ciprofloxacin;Clindamycin; | fluoroquinolone; |
| | | | | Erythromycin;Imipenem;Levofloxacin; | lactam; lincosa- |
| | | | | Moxifloxacin;Oxacillin;Penicillin | mide;macrolide |
| | | | | G;Tobramycin | |
| 41 | 1928346 F | NC_017340.1 | 04_02981 | Ampicillin/Sulbactam;Cefepime;Cefotaxim; | aminoglycoside; |
| | | | | Cefuroxim;Ciprofloxacin;Clindamycin; | fluoroquinolone; |
| | | | | Erythromycin;Imipenem;Levofloxacin; | lactam; lincosa- |
| | | | | Moxifloxacin;Oxacillin;Penicillin | mide;macrolide |
| | | | | G;Tobramycin | |
| 42 | 1376396 R | NC_010079.1 | USA300_TCH1516 | Ampicillin/Sulbactam;Cefepime;Cefotaxim; | aminoglycoside; |
| | 1323236 R | NC_022222.1 | 6850 | Cefuroxim;Ciprofloxacin;Clindamycin; | fluoroquinolone; |
| | 1315892 R | NC_022226.1 | CN1 | Erythromycin;Imipenem;Levofloxacin; | lactam; lincosa- |
| | 1379143 R | NC_017340.1 | 04_02981 | Moxifloxacin;Oxacillin;Penicillin | mide;macrolide |
| | 1399306 F | NC_021670.1 | Bmb9393 | G;Tobramycin | |
| 43 | 1338943 R | NC_017340.1 | 04_02981 | Ampicillin/Sulbactam;Cefepime;Cefotaxim; | aminoglycoside; |
| | | | | Cefuroxim;Ciprofloxacin;Clindamycin; | fluoroquinolone; |
| | | | | Erythromycin;Imipenem;Levofloxacin; | lactam; lincosa- |
| | | | | Moxifloxacin;Oxacillin;Penicillin | mide;macrolide |
| | | | | G;Tobramycin | |
| 44 | 1124668 F | NC_017340.1 | 04_02981 | Ampicillin/Sulbactam;Cefepime;Cefotaxim; | aminoglycoside; |
| | 1121585 F | NC_010079.1 | USA300_TCH1516 | Cefuroxim;Ciprofloxacin;Clindamycin; | fluoroquinolone; |
| | | | | Erythromycin;Imipenem;Levofloxacin; | lactam; lincosa- |
| | | | | Moxifloxacin;Oxacillin;Penicillin | mide;macrolide |
| | | | | G;Tobramycin | |
| 45 | 559072 R | NC_017340.1 | 04_02981 | Ampicillin/Sulbactam;Cefepime;Cefotaxim; | aminoglycoside; |
| | 504007 R | NC_007795.1 | NCTC_8325 | Cefuroxim;Ciprofloxacin;Clindamycin; | fluoroquinolone; |
| | | | | Erythromycin;Imipenem;Levofloxacin; | lactam; lincosa- |
| | | | | Moxifloxacin;Oxacillin;Penicillin | mide;macrolide |
| | | | | G;Tobramycin | |
| 46 | 1675156 R | NC_017340.1 | 04_02981 | Ampicillin/Sulbactam;Cefepime;Cefotaxim; | aminoglycoside; |
| | | | | Cefuroxim;Ciprofloxacin;Clindamycin; | fluoroquinolone; |
| | | | | Erythromycin;Imipenem;Levofloxacin; | lactam; lincosa- |
| | | | | Moxifloxacin;Oxacillin;Penicillin | mide;macrolide |
| | | | | G;Tobramycin | |
| 47 | 1187805 F | NC_017340.1 | 04_02981 | Ampicillin/Sulbactam;Cefepime;Cefotaxim; | aminoglycoside; |
| | 1078815 F | NC_022113.1 | 55_2053 | Cefuroxim;Ciprofloxacin;Clindamycin; | fluoroquinolone; |
| | 1182930 F | NC_010079.1 | USA300_TCH1516 | Erythromycin;Imipenem;Levofloxacin; | lactam; lincosa- |
| | | | | Moxifloxacin;Oxacillin;Penicillin | mide;macrolide |
| | | | | G;Tobramycin | |
| 48 | 1356138 F | NC_017340.1 | 04_02981 | Ampicillin/Sulbactam;Cefepime;Cefotaxim; | aminoglycoside; |
| | | | | Cefuroxim;Ciprofloxacin;Clindamycin; | fluoroquinolone; |
| | | | | Erythromycin;Imipenem;Levofloxacin; | lactam; lincosa- |
| | | | | Moxifloxacin;Oxacillin;Penicillin | mide;macrolide |
| | | | | G;Tobramycin | |
| 49 | 854815 R | NC_007795.1 | NCTC_8325 | Ampicillin/Sulbactam;Cefepime;Cefotaxim; | aminoglycoside; |
| | 953539 R | NC_017340.1 | 04_02981 | Cefuroxim;Ciprofloxacin;Clindamycin; | fluoroquinolone; |
| | 948900 R | NC_010079.1 | USA300_TCH1516 | Erythromycin;Imipenem;Levofloxacin; | lactam; lincosa- |
| | | | | Moxifloxacin;Oxacillin;Penicillin | mide;macrolide |
| | | | | G;Tobramycin | |
| 50 | 2459738 F | NC_017340.1 | 04_02981 | Ampicillin/Sulbactam;Cefepime;Cefotaxim; | aminoglycoside; |
| | 2364478 F | NC_022222.1 | 6850 | Cefuroxim;Ciprofloxacin;Clindamycin; | fluoroquinolone; |
| | | | | Erythromycin;Imipenem;Levofloxacin; | lactam; lincosa- |
| | | | | Moxifloxacin;Oxacillin;Penicillin | mide;macrolide |
| | | | | G;Tobramycin | |

TABLE 4b
List of positions (corresponding to Table 3a, continued)

| No. | best_pv | GenomeName | fasta_header | SNPPositioninGenome | gene |
|---|---|---|---|---|---|
| 1 | 6.0168E−193 | 04_02981 | gi\|387149188\|ref\|NC_017340.1\| | 1958403 R | |
| | | USA300_TCH1516 | gi\|161508266\|ref\|NC_010079.1\| | 2004910 R | |
| 2 | 1.4167E−189 | 04_02981 | gi\|387149188\|ref\|NC_017340.1\| | 1641150 R | |
| 3 | 1.4167E−189 | 04_02981 | gi\|387149188\|ref\|NC_017340.1\| | 978538 F | |
| 4 | 1.4167E−189 | 04_02981 | gi\|387149188\|ref\|NC_017340.1\| | 705667 R | |
| 5 | 1.4167E−189 | 04_02981 | gi\|387149188\|ref\|NC_017340.1\| | 1434811 R | |
| 6 | 1.4167E−189 | 6850 | gi\|537441500\|ref\|NC_022222.1\| | 953696 R | |
| | | USA300_TCH1516 | gi\|161508266\|ref\|NC_010079.1\| | 1010027 R | rluA1 |
| 7 | 1.4167E−189 | Bmb9393 | gi\|521210823\|ref\|NC_021670.1\| | 2101899 R | |
| | | 04_02981 | gi\|387149188\|ref\|NC_017340.1\| | 1972149 R | |
| 8 | 1.4167E−189 | 04_02981 | gi\|387149188\|ref\|NC_017340.1\| | 208285 R | argC |
| | | NCTC_8325 | gi\|88193823\|ref\|NC_007795.1\| | 161011 R | argC |
| 9 | 1.4167E−189 | 11819_97 | gi\|385780298\|ref\|NC_017351.1\| | 2179136 R | |
| | | 04_02981 | gi\|387149188\|ref\|NC_017340.1\| | 2149064 R | |
| | | 08BA02176 | gi\|404477334\|ref\|NC_018608.1\| | 2107689 R | |
| 10 | 1.4167E−189 | 04_02981 | gi\|387149188\|ref\|NC_017340.1\| | 2358535 F | |
| 11 | 1.4167E−189 | 04_02981 | gi\|387149188\|ref\|NC_017340.1\| | 2023012 R | |
| 12 | 1.4167E−189 | NCTC_8325 | gi\|88193823\|ref\|NC_007795.1\| | 2777211 F | |
| | | 04_02981 | gi\|387149188\|ref\|NC_017340.1\| | 2779170 F | |
| 13 | 1.4167E−189 | 08BA02176 | gi\|404477334\|ref\|NC_018608.1\| | 1801995 R | |
| | | 04_02981 | gi\|387149188\|ref\|NC_017340.1\| | 1790672 R | |
| 14 | 3.0731E−189 | 04_02981 | gi\|387149188\|ref\|NC_017340.1\| | 1754561 F | |
| | | NCTC_8325 | gi\|88193823\|ref\|NC_007795.1\| | 1691742 F | |
| 15 | 3.1179E−189 | 04_02981 | gi\|387149188\|ref\|NC_017340.1\| | 1362060 F | |
| 16 | 3.7988E−189 | 6850 | gi\|537441500\|ref\|NC_022222.1\| | 1242653 R | |
| | | USA300_TCH1516 | gi\|161508266\|ref\|NC_010079.1\| | 1294527 R | ribC |
| | | 04_02981 | gi\|387149188\|ref\|NC_017340.1\| | 1299554 R | |
| 17 | 3.9683E−189 | Bmb9393 | gi\|521210823\|ref\|NC_021670.1\| | 1252703 R | |
| | | 11819_97 | gi\|385780298\|ref\|NC_017351.1\| | 1520285 F | |
| | | 04_02981 | gi\|387149188\|ref\|NC_017340.1\| | 1523326 F | |
| 18 | 3.9683E−189 | 04_02981 | gi\|387149188\|ref\|NC_017340.1\| | 1619285 R | |
| | | USA300_TCH1516 | gi\|161508266\|ref\|NC_010079.1\| | 1661238 R | |
| 19 | 3.9683E−189 | 6850 | gi\|537441500\|ref\|NC_022222.1\| | 1875550 F | |
| | | USA300_TCH1516 | gi\|161508266\|ref\|NC_010079.1\| | 2006001 F | bcp |
| | | 04_02981 | gi\|387149188\|ref\|NC_017340.1\| | 1959494 F | |
| 20 | 5.4236E−189 | 04_02981 | gi\|387149188\|ref\|NC_017340.1\| | 976788 F | |
| | | NCTC_8325 | gi\|88193823\|ref\|NC_007795.1\| | 878040 F | |
| 21 | 7.5452E−189 | 04_02981 | gi\|387149188\|ref\|NC_017340.1\| | 2590222 R | |
| | | USA300_TCH1516 | gi\|161508266\|ref\|NC_010079.1\| | 2637689 R | gntP |
| 22 | 9.5271E−189 | 6850 | gi\|537441500\|ref\|NC_022222.1\| | 210528 R | |
| | | 0402981 | gi\|387149188\|ref\|NC_017340.1\| | 267448 R | |
| | | USA300_TCH1516 | gi\|161508266\|ref\|NC_010079.1\| | 269814 R | |
| 23 | 1.1093E−188 | 04_02981 | gi\|387149188\|ref\|NC_017340.1\| | 1814108 R | |
| 24 | 3.3279E−188 | MSSA476 | gi\|49484912\|ref\|NC_002953.31 | 170059 F | |
| | | ED133 | gi\|384546269\|ref\|NC_017337.1\| | 142263 F | |
| 25 | 3.3279E−188 | 04_02981 | gi\|387149188\|ref\|NC_017340.1\| | 534953 F | |
| | | USA300_TCH1516 | gi\|161508266\|ref\|NC_010079.1\| | 543821 F | |
| 26 | 3.5518E−188 | 04_02981 | gi\|387149188\|ref\|NC_017340.1\| | 517571 F | |
| | | 08BA02176 | gi\|404477334\|ref\|NC_018608.1\| | 554542 F | |
| 27 | 1.1492E−187 | 04_02981 | gi\|387149188\|ref\|NC_017340.1\| | 531649 R | |
| | | 11819_97 | gi\|385780298\|ref\|NC_017351.1\| | 531398 R | |
| 28 | 1.1509E−187 | NCTC_8325 | gi\|88193823\|ref\|NC_007795.1\| | 1050123 R | |
| | | 04_02981 | gi\|387149188\|ref\|NC_017340.1\| | 1147277 R | |
| 29 | 9.0648E−187 | USA300_TCH1516 | gi\|161508266\|ref\|NC_010079.1\| | 1881161 R | fmtB1 |
| | | M1 | gi\|479328021\|ref\|NC_021059.1\| | 1871101 R | |
| | | 6850 | gi\|537441500\|ref\|NC_022222.1\| | 1759861 R | |
| | | 08BA02176 | gi\|404477334\|ref\|NC_018608.1\| | 1855493 R | |
| | | CC45 | gi\|514064966\|ref\|NC_021554.1\| | 1858794 R | |
| | | Bmb9393 | gi\|521210823\|ref\|NC_021670.1\| | 1964828 R | |
| 30 | 1.5807E−186 | USA300_TCH1516 | gi\|161508266\|ref\|NC_010079.1\| | 2268723 F | |
| | | 04_02981 | gi\|387149188\|ref\|NC_017340.1\| | 2221448 F | |
| 31 | 3.6257E−174 | M1 | gi\|479328021\|ref\|NC_021059.1\| | 920768 F | rocD |
| | | 08BA02176 | gi\|404477334\|ref\|NC_018608.1\| | 956878 F | rocD |
| | | 04_02981 | gi\|387149188\|ref\|NC_017340.1\| | 956978 F | rocD |
| | | NCTC_8325 | gi\|88193823\|ref\|NC_007795.1\| | 858255 F | rocD |
| 32 | 3.9753E−174 | VC40 | gi\|379013365\|ref\|NC_016912.1\| | 2005634 F | |
| | | 6850 | gi\|537441500\|ref\|NC_022222.1\| | 2039052 F | |
| | | USA300_TCH1516 | gi\|161508266\|ref\|NC_010079.1\| | 2187801 F | rsbU |
| 33 | 7.1007E−174 | 04_02981 | gi\|387149188\|ref\|NC_017340.1\| | 429303 F | |
| 34 | 1.8906E−173 | 6850 | gi\|537441500\|ref\|NC_022222.1\| | 350202 F | |
| | | 04_02981 | gi\|387149188\|ref\|NC_017340.1\| | 402479 F | |
| | | NCTC_8325 | gi\|88193823\|ref\|NC_007795.1\| | 352104 F | |
| 35 | 3.0713E−172 | CN1 | gi\|537459744\|ref\|NC_022226.1\| | 158073 F | |
| | | M1 | gi\|479328021\|ref\|NC_021059.1\| | 193628 F | |
| | | 6850 | gi\|537441500\|ref\|NC_022222.1\| | 138357 F | |
| | | USA300_TCH1516 | gi\|161508266\|ref\|NC_010079.1\| | 196480 F | |
| | | 04_02981 | gi\|387149188\|ref\|NC_017340.1\| | 189192 F | |
| 36 | 4.4332E−172 | 04_02981 | gi\|387149188\|ref\|NC_017340.1\| | 1121847 R | |
| | | NCTC_8325 | gi\|88193823\|ref\|NC_007795.1\| | 1024692 R | |
| 37 | 4.4332E−172 | USA300_TCH1516 | gi\|161508266\|ref\|NC_010079.1\| | 2719339 R | |
| | | 04_02981 | gi\|387149188\|ref\|NC_017340.1\| | 2668764 R | |
| 38 | 5.5156E−172 | CN1 | gi\|537459744\|ref\|NC_022226.1\| | 1388095 R | |
| 39 | 1.2003E−171 | 04_02981 | gi\|387149188\|ref\|NC_017340.1\| | 1415365 R | |
| | | 08BA02176 | gi\|404477334\|ref\|NC_018608.1\| | 1428821 R | |
| | | NCTC_8325 | gi\|88193823\|ref\|NC_007795.1\| | 1318646 R | |
| | | USA300_TCH1516 | gi\|161508266\|ref\|NC_010079.1\| | 1412563 R | femB |
| | | M1 | gi\|479328021\|ref\|NC_021059.1\| | 1381147 R | |
| 40 | 1.2003E−171 | 04_02981 | gi\|387149188\|ref\|NC_017340.1\| | 1678734 R | |
| | | USA300_TCH1516 | gi\|161508266\|ref\|NC_010079.1\| | 1720315 R | |
| 41 | 1.2491E−171 | 04_02981 | gi\|387149188\|ref\|NC_017340.1\| | 1928346 F | |
| 42 | 2.3661E−171 | USA300_TCH1516 | gi\|161508266\|ref\|NC_010079.1\| | 1376396 R | sbcC |
| | | 6850 | gi\|537441500\|ref\|NC_022222.1\| | 1323236 R | |
| | | CN1 | gi\|537459744\|ref\|NC_022226.1\| | 1315892 R | |
| | | 04_02981 | gi\|387149188\|ref\|NC_017340.1\| | 1379143 R | |
| | | Bmb9393 | gi\|521210823\|ref\|NC_021670.1\| | 1399306 F | |
| 43 | 2.3661E−171 | 04_02981 | gi\|387149188\|ref\|NC_017340.1\| | 1338943 R | |
| 44 | 5.3408E−171 | 04_02981 | gi\|387149188\|ref\|NC_017340.1\| | 1124668 F | |
| | | USA300_TCH1516 | gi\|161508266\|ref\|NC_010079.1\| | 1121585 F | |
| 45 | 1.0222E−170 | 04_02981 | gi\|387149188\|ref\|NC_017340.1\| | 559072 R | |
| | | NCTC_8325 | gi\|88193823\|ref\|NC_007795.1\| | 504007 R | |
| 46 | 1.0498E−170 | 04_02981 | gi\|387149188\|ref\|NC_017340.1\| | 1675156 R | |
| 47 | 2.283E−170 | 04_02981 | gi\|387149188\|ref\|NC_017340.1\| | 1187805 F | |
| | | 55_2053 | gi\|532358222\|ref\|NC_022113.1\| | 1078815 F | |
| | | USA300_TCH1516 | gi\|161508266\|ref\|NC_010079.1\| | 1182930 F | |
| 48 | 2.3666E−170 | 04_02981 | gi\|387149188\|ref\|NC_017340.1\| | 1356138 F | |
| 49 | 4.1086E−170 | NCTC_8325 | gi\|88193823\|ref\|NC_007795.1\| | 854815 R | |
| | | 04_02981 | gi\|387149188\|ref\|NC_017340.1\| | 953539 R | |
| | | USA300_TCH1516 | gi\|161508266\|ref\|NC_010079.1\| | 948900 R | prsA1 |
| 50 | 4.2262E−169 | 04_02981 | gi\|387149188\|ref\|NC_017340.1\| | 2459738 F | |
| | | 6850 | gi\|537441500\|ref\|NC_022222.1\| | 2364478 F | |

TABLE 4c
List of positions (corresponding to Table 3a, continued)

| No. | AminoAcids | Codons | GenomeGI | Protein_GI |
|---|---|---|---|---|
| 1 | A_T | ACA__GCA | 387149188 | 446792191 |
| | A_T | ACA_GCA | 161508266 | 161510080 |
| 2 | E_K | AAA_GAA | 387149188 | 446032753 |
| 3 | I_M | ATC_ATG | 387149188 | 446312722 |
| 4 | E_K | AAG_GAG | 387149188 | 446725640 |
| 5 | A_S | GCA_TCA | 387149188 | 446180863 |
| 6 | L_P | CCT_CTT | 537441500 | 537465549 |
| | L_P | CCT_CTT | 161508266 | 161509205 |
| 7 | M_V | ATG_GTG | 521210823 | 752533903 |
| | M_V | ATG_GTG | 387149188 | 446753128 |
| 8 | K_T | AAA_ACA | 387149188 | 446556386 |
| | K_T | AAA_ACA | 88193823 | 88193961 |
| 9 | M_V | ATG_GTG | 385780298 | 446324804 |
| | M_V | ATG_GTG | 387149188 | 446324797 |
| | M_V | ATG_GTG | 404477334 | 446324791 |
| 10 | K_N | AAA_AAC | 387149188 | 445930822 |
| 11 | E_V | GAA_GTA | 387149188 | 446943955 |
| 12 | F_L | TTG_TTT | 88193823 | 88196623 |
| | F_L | TTG_TTT | 387149188 | 446800117 |
| 13 | Q_R | CAG_CGG | 404477334 | 446795417 |
| | Q_R | CAG_CGG | 387149188 | 446795407 |
| 14 | L_V | GTA_TTA | 387149188 | 446028277 |
| | L_V | GTA_TTA | 88193823 | 88195494 |
| 15 | I_N | AAT_ATT | 387149188 | 447178207 |
| 16 | I_T | ACC_ATC | 537441500 | 537465687 |
| | I_T | ACC_ATC | 161508266 | 161509438 |
| | I_T | ACC_ATC | 387149188 | 446786934 |
| 17 | L_S | TCA_TTA | 521210823 | 521258120 |
| | L_S | TCA_TTA | 385780298 | 446060496 |
| | L_S | TCA_TTA | 387149188 | 446060495 |
| 18 | N_S | AAT_AGT | 387149188 | 446940596 |
| | N_S | AAT_AGT | 161508266 | 161509778 |
| 19 | D_Y | GAT_TAT | 537441500 | 537465893 |
| | D_Y | GAT_TAT | 161508266 | 161510081 |
| | D_Y | GAT_TAT | 387149188 | 446862272 |
| 20 | F_L | TTA_TTT | 387149188 | 447047252 |
| | F_L | TTA_TTT | 88193823 | 88194665 |
| 21 | K_T | AAA_ACA | 387149188 | 446403560 |
| | K_T | AAA_ACA | 161508266 | 161510698 |
| 22 | A_V | GCA_GTA | 537441500 | 537465126 |
| | A_V | GCA_GTA | 387149188 | 447077358 |
| | A_V | GCA_GTA | 161508266 | 161508491 |
| 23 | A_V | GCG_GTG | 387149188 | 446784840 |
| 24 | G_R | AGA_GGA | 49484912 | 487756815 |
| | G_R | AGA_GGA | 384546269 | 446093782 |
| 25 | F_L | TTA_TTT | 387149188 | 446874184 |
| | F_L | TTA_TTT | 161508266 | 161508745 |
| 26 | K_R | AAA_AGA | 387149188 | 446973880 |
| | K_R | AAA_AGA | 404477334 | 446973883 |
| 27 | N_T | AAT_ACT | 387149188 | 446076361 |
| | N_T | AAT_ACT | 385780298 | 446076373 |
| 28 | F_L | TTA_TTT | 88193823 | 88194836 |
| | F_L | TTA_TTT | 387149188 | 446593607 |
| 29 | K_T | AAG_ACG | 161508266 | 161509974 |
| | K_T | AAG_ACG | 479328021 | 505394769 |
| | K_T | AAG_ACG | 537441500 | 537465850 |
| | K_T | AAG_ACG | 404477334 | 446973259 |
| | K_T | AAG_ACG | 514064966 | 514074897 |
| | K_T | AAG_ACG | 521210823 | 521258173 |
| 30 | L_S | TCA_TTA | 161508266 | 161510359 |
| | L_S | TCA_TTA | 387149188 | 446293068 |
| 31 | E_K | AAA_GAA | 479328021 | 505394709 |
| | E_K | AAA_GAA | 404477334 | 446089469 |
| | E_K | AAA_GAA | 387149188 | 446089454 |
| | E_K | AAA_GAA | 88193823 | 88194651 |
| 32 | I_V | ATA_GTA | 379013365 | 487720346 |
| | I_V | ATA_GTA | 537441500 | 537465949 |
| | I_V | ATA_GTA | 161508266 | 161510279 |
| 33 | G_V | GGA_GTA | 387149188 | 446343556 |
| 34 | K_T | AAA_ACA | 537441500 | 537465192 |
| | K_T | AAA_ACA | 387149188 | 446129782 |
| | K_T | AAA_ACA | 88193823 | 88194138 |
| 35 | I_V | ATT_GTT | 537459744 | 537467717 |
| | I_V | ATT_GTT | 479328021 | 505394663 |
| | I_V | ATT_GTT | 537441500 | 537465062 |
| | I_V | ATT_GTT | 161508266 | 161508437 |
| | I_V | ATT_GTT | 387149188 | 446513509 |
| 36 | I_T | ACA_ATA | 387149188 | 446104798 |
| | I_T | ACA_ATA | 88193823 | 88194808 |
| 37 | P_T | ACA_CCA | 161508266 | 161510779 |
| | P_T | ACA_CCA | 387149188 | 446083969 |
| 38 | C_Y | TAT_TGT | 537459744 | 686312170 |
| 39 | L_S | TCA_TTA | 387149188 | 446595763 |
| | L_S | TCA_TTA | 404477334 | 446595752 |
| | L_S | TCA_TTA | 88193823 | 88195101 |
| | L_S | TCA_TTA | 161508266 | 161509542 |
| | L_S | TCA_TTA | 479328021 | 505394733 |
| 40 | I_L | ATT_CTT | 387149188 | 446059917 |
| | I_L | ATT_CTT | 161508266 | 161509840 |
| 41 | A_G | GCA_GGA | 387149188 | 446506832 |
| 42 | I_T | ACT_ATT | 161508266 | 161509514 |
| | I_T | ACT_ATT | 537441500 | 537465718 |
| | I_T | ACT_ATT | 537459744 | 537467986 |
| | I_T | ACT_ATT | 387149188 | 446725826 |
| | I_T | ACT_ATT | 521210823 | 521258127 |
| 43 | C_G | GGT_TGT | 387149188 | 445990753 |
| 44 | I_L | ATA_TTA | 387149188 | 446710589 |
| | I_L | ATA_TTA | 161508266 | 161509291 |
| 45 | A_V | GCC_GTC | 387149188 | 446804811 |
| | A_V | GCC_GTC | 88193823 | 88194284 |
| 46 | D_N | AAT_GAT | 387149188 | 446305320 |
| 47 | I_T | ACA_ATA | 387149188 | 446462960 |
| | I_T | ACA_ATA | 532358222 | 532479591 |
| | I_T | ACA_ATA | 161508266 | 161509351 |
| 48 | E_Q | CAA_GAA | 387149188 | 446764090 |
| 49 | A_V | GCA_GTA | 88193823 | 88194648 |
| | A_V | GCA_GTA | 387149188 | 445957208 |
| | A_V | GCA_GTA | 161508266 | 161509155 |
| 50 | H_Y | CAT_TAT | 387149188 | 446198905 |
| | H_Y | CAT_TAT | 537441500 | 537466083 |

TABLE 4d
List of positions (corresponding to Table 3a, continued)

| | | | num_amino- | num_fluoro- | | | | num_tetra- |
|---|---|---|---|---|---|---|---|---|
| No. | best_pheno | best_pheno_class | glycoside | quinolone | num_lactam | num_lincosamide | num_macrolide | cycline |
| 1 | Moxifloxacin | fluoroquinolone | 1 | 3 | 7 | 1 | 1 | 0 |
| 2 | Moxifloxacin | fluoroquinolone | 1 | 3 | 7 | 1 | 1 | 0 |
| 3 | Moxifloxacin | fluoroquinolone | 1 | 3 | 7 | 1 | 1 | 0 |
| 4 | Moxifloxacin | fluoroquinolone | 1 | 3 | 7 | 1 | 1 | 0 |
| 5 | Moxifloxacin | fluoroquinolone | 1 | 3 | 7 | 1 | 1 | 0 |
| 6 | Moxifloxacin | fluoroquinolone | 1 | 3 | 7 | 1 | 1 | 0 |
| 7 | Moxifloxacin | fluoroquinolone | 1 | 3 | 7 | 1 | 1 | 0 |
| 8 | Moxifloxacin | fluoroquinolone | 1 | 3 | 7 | 1 | 1 | 0 |
| 9 | Moxifloxacin | fluoroquinolone | 1 | 3 | 7 | 1 | 1 | 0 |
| 10 | Moxifloxacin | fluoroquinolone | 1 | 3 | 7 | 1 | 1 | 0 |
| 11 | Moxifloxacin | fluoroquinolone | 1 | 3 | 7 | 1 | 1 | 0 |
| 12 | Moxifloxacin | fluoroquinolone | 1 | 3 | 7 | 1 | 1 | 0 |
| 13 | Moxifloxacin | fluoroquinolone | 1 | 3 | 7 | 1 | 1 | 0 |
| 14 | Moxifloxacin | fluoroquinolone | 1 | 3 | 7 | 1 | 1 | 0 |
| 15 | Moxifloxacin | fluoroquinolone | 1 | 3 | 7 | 1 | 1 | 0 |
| 16 | Moxifloxacin | fluoroquinolone | 1 | 3 | 7 | 1 | 1 | 0 |
| 17 | Moxifloxacin | fluoroquinolone | 1 | 3 | 7 | 1 | 1 | 0 |
| 18 | Moxifloxacin | fluoroquinolone | 1 | 3 | 7 | 1 | 1 | 0 |
| 19 | Moxifloxacin | fluoroquinolone | 1 | 3 | 7 | 1 | 1 | 0 |
| 20 | Moxifloxacin | fluoroquinolone | 1 | 3 | 7 | 1 | 1 | 0 |
| 21 | Moxifloxacin | fluoroquinolone | 1 | 3 | 7 | 1 | 1 | 0 |
| 22 | Moxifloxacin | fluoroquinolone | 1 | 3 | 7 | 1 | 1 | 0 |
| 23 | Moxifloxacin | fluoroquinolone | 1 | 3 | 7 | 1 | 1 | 0 |
| 24 | Moxifloxacin | fluoroquinolone | 1 | 3 | 7 | 1 | 1 | 0 |
| 25 | Moxifloxacin | fluoroquinolone | 1 | 3 | 7 | 1 | 1 | 0 |
| 26 | Moxifloxacin | fluoroquinolone | 1 | 3 | 7 | 1 | 1 | 0 |
| 27 | Moxifloxacin | fluoroquinolone | 1 | 3 | 7 | 1 | 1 | 0 |
| 28 | Moxifloxacin | fluoroquinolone | 1 | 3 | 7 | 1 | 1 | 0 |
| 29 | Moxifloxacin | fluoroquinolone | 1 | 3 | 7 | 1 | 1 | 0 |
| 30 | Moxifloxacin | fluoroquinolone | 1 | 3 | 7 | 1 | 1 | 0 |
| 31 | Moxifloxacin | fluoroquinolone | 1 | 3 | 7 | 1 | 1 | 0 |
| 32 | Moxifloxacin | fluoroquinolone | 1 | 3 | 7 | 1 | 1 | 0 |
| 33 | Moxifloxacin | fluoroquinolone | 1 | 3 | 7 | 1 | 1 | 0 |
| 34 | Moxifloxacin | fluoroquinolone | 1 | 3 | 7 | 1 | 1 | 0 |
| 35 | Moxifloxacin | fluoroquinolone | 1 | 3 | 7 | 1 | 1 | 0 |
| 36 | Moxifloxacin | fluoroquinolone | 1 | 3 | 7 | 1 | 1 | 0 |
| 37 | Moxifloxacin | fluoroquinolone | 1 | 3 | 7 | 1 | 1 | 0 |
| 38 | Moxifloxacin | fluoroquinolone | 1 | 3 | 7 | 1 | 1 | 0 |
| 39 | Moxifloxacin | fluoroquinolone | 1 | 3 | 7 | 1 | 1 | 0 |
| 40 | Moxifloxacin | fluoroquinolone | 1 | 3 | 7 | 1 | 1 | 0 |
| 41 | Moxifloxacin | fluoroquinolone | 1 | 3 | 7 | 1 | 1 | 0 |
| 42 | Moxifloxacin | fluoroquinolone | 1 | 3 | 7 | 1 | 1 | 0 |
| 43 | Moxifloxacin | fluoroquinolone | 1 | 3 | 7 | 1 | 1 | 0 |
| 44 | Moxifloxacin | fluoroquinolone | 1 | 3 | 7 | 1 | 1 | 0 |
| 45 | Moxifloxacin | fluoroquinolone | 1 | 3 | 7 | 1 | 1 | 0 |
| 46 | Moxifloxacin | fluoroquinolone | 1 | 3 | 7 | 1 | 1 | 0 |
| 47 | Moxifloxacin | fluoroquinolone | 1 | 3 | 7 | 1 | 1 | 0 |
| 48 | Moxifloxacin | fluoroquinolone | 1 | 3 | 7 | 1 | 1 | 0 |
| 49 | Moxifloxacin | fluoroquinolone | 1 | 3 | 7 | 1 | 1 | 0 |
| 50 | Moxifloxacin | fluoroquinolone | 1 | 3 | 7 | 1 | 1 | 0 |

TABLE 4e
List of positions (corresponding to Table 3b)

| No. | position | reference genome | genome name | sign_phenos | sign_phenos_class |
|---|---|---|---|---|---|
| 1 | 1958403 R | NC_017340.1 | 04_02981 | Ampicillin/Sulbactam; Cefepime; Cefotaxim; | aminoglycoside; |
| | 2004910 R | NC_010079.1 | USA300_TCH1516 | Cefuroxim; Ciprofloxacin; Clindamycin; | fluoroquinolone; |
| | | | | Erythromycin; Imipenem; Levofloxacin; | lactam; |
| | | | | Moxifloxacin; Oxacillin; Penicillin | lincosamide; |
| | | | | G; Tobramycin | macrolide |
| 2 | 1641150 R | NC_017340.1 | 04_02981 | Ampicillin/Sulbactam; Cefepime; Cefotaxim; | aminoglycoside; |
| | | | | Cefuroxim; Ciprofloxacin; Clindamycin; | fluoroquinolone; |
| | | | | Erythromycin; Imipenem; Levofloxacin; | lactam; |
| | | | | Moxifloxacin; Oxacillin; Penicillin | lincosamide; |
| | | | | G; Tobramycin | macrolide |
| 3 | 978538 F | NC_017340.1 | 04_02981 | Ampicillin/Sulbactam; Cefepime; Cefotaxim; | aminoglycoside; |
| | | | | Cefuroxim; Ciprofloxacin; Clindamycin; | fluoroquinolone; |
| | | | | Erythromycin; Imipenem; Levofloxacin; | lactam; |
| | | | | Moxifloxacin; Oxacillin; Penicillin | lincosamide; |
| | | | | G; Tobramycin | macrolide |
| 4 | 705667 R | NC_017340.1 | 04_02981 | Ampicillin/Sulbactam; Cefepime; Cefotaxim; | aminoglycoside; |
| | | | | Cefuroxim; Ciprofloxacin; Clindamycin; | fluoroquinolone; |
| | | | | Erythromycin; Imipenem; Levofloxacin; | lactam; |
| | | | | Moxifloxacin; Oxacillin; Penicillin | lincosamide; |
| | | | | G; Tobramycin | macrolide |
| 5 | 1434811 R | NC_017340.1 | 04_02981 | Ampicillin/Sulbactam; Cefepime; Cefotaxim; | aminoglycoside; |
| | | | | Cefuroxim; Ciprofloxacin; Clindamycin; | fluoroquinolone; |
| | | | | Erythromycin; Imipenem; Levofloxacin; | lactam; |
| | | | | Moxifloxacin; Oxacillin; Penicillin | lincosamide; |
| | | | | G; Tobramycin | macrolide |
| 6 | 953696 R | NC_022222.1 | 6850 | Ampicillin/Sulbactam; Cefepime; Cefotaxim; | aminoglycoside; |
| | 1010027 R | NC_010079.1 | USA300_TCH1516 | Cefuroxim; Ciprofloxacin; Clindamycin; | fluoroquinolone; |
| | | | | Erythromycin; Imipenem; Levofloxacin; | lactam; |
| | | | | Moxifloxacin; Oxacillin; Penicillin | lincosamide; |
| | | | | G; Tobramycin | macrolide |
| 7 | 2101899 R | NC_021670.1 | Bmb9393 | Ampicillin/Sulbactam; Cefepime; Cefotaxim; | aminoglycoside; |
| | 1972149 R | NC_017340.1 | 04_02981 | Cefuroxim; Ciprofloxacin; Clindamycin; | fluoroquinolone; |
| | | | | Erythromycin; Imipenem; Levofloxacin; | lactam; |
| | | | | Moxifloxacin; Oxacillin; Penicillin | lincosamide; |
| | | | | G; Tobramycin | macrolide |
| 8 | 208285 R | NC_017340.1 | 04_02981 | Ampicillin/Sulbactam; Cefepime; Cefotaxim; | aminoglycoside; |
| | 161011 R | NC_007795.1 | NCTC_8325 | Cefuroxim; Ciprofloxacin; Clindamycin; | fluoroquinolone; |
| | | | | Erythromycin; Imipenem; Levofloxacin; | lactam; |
| | | | | Moxifloxacin; Oxacillin; Penicillin | lincosamide; |
| | | | | G; Tobramycin | macrolide |
| 9 | 2179136 R | NC_017351.1 | 11819_97 | Ampicillin/Sulbactam; Cefepime; Cefotaxim; | aminoglycoside; |
| | 2149064 R | NC_017340.1 | 04_02981 | Cefuroxim; Ciprofloxacin; Clindamycin; | fluoroquinolone; |
| | 2107689 R | NC_018608.1 | 08BA02176 | Erythromycin; Imipenem; Levofloxacin; | lactam; |
| | | | | Moxifloxacin; Oxacillin; Penicillin | lincosamide; |
| | | | | G; Tobramycin | macrolide |
| 10 | 2358535 F | NC_017340.1 | 04_02981 | Ampicillin/Sulbactam; Cefepime; Cefotaxim; | aminoglycoside; |
| | | | | Cefuroxim; Ciprofloxacin; Clindamycin; | fluoroquinolone; |
| | | | | Erythromycin; Imipenem; Levofloxacin; | lactam; |
| | | | | Moxifloxacin; Oxacillin; Penicillin | lincosamide; |
| | | | | G; Tobramycin | macrolide |
| 11 | 2023012 R | NC_017340.1 | 04_02981 | Ampicillin/Sulbactam; Cefepime; Cefotaxim; | aminoglycoside; |
| | | | | Cefuroxim; Ciprofloxacin; Clindamycin; | fluoroquinolone; |
| | | | | Erythromycin; Imipenem; Levofloxacin; | lactam; |
| | | | | Moxifloxacin; Oxacillin; Penicillin | lincosamide; |
| | | | | G; Tobramycin | macrolide |
| 12 | 2777211 F | NC_007795.1 | NCTC_8325 | Ampicillin/Sulbactam; Cefepime; Cefotaxim; | aminoglycoside; |
| | 2779170 F | NC_017340.1 | 04_02981 | Cefuroxim; Ciprofloxacin; Clindamycin; | fluoroquinolone; |
| | | | | Erythromycin; Imipenem; Levofloxacin; | lactam; |
| | | | | Moxifloxacin; Oxacillin; Penicillin | lincosamide; |
| | | | | G; Tobramycin | macrolide |
| 13 | 1801995 R | NC_018608.1 | 08BA02176 | Ampicillin/Sulbactam; Cefepime; Cefotaxim; | aminoglycoside; |
| | 1790672 R | NC_017340.1 | 04_02981 | Cefuroxim; Ciprofloxacin; Clindamycin; | fluoroquinolone; |
| | | | | Erythromycin; Imipenem; Levofloxacin; | lactam; |
| | | | | Moxifloxacin; Oxacillin; Penicillin | lincosamide; |
| | | | | G; Tobramycin | macrolide |
| 14 | 1754561 F | NC_017340.1 | 04_02981 | Ampicillin/Sulbactam; Cefepime; Cefotaxim; | aminoglycoside; |
| | 1691742 F | NC_007795.1 | NCTC_8325 | Cefuroxim; Ciprofloxacin; Clindamycin; | fluoroquinolone; |
| | | | | Erythromycin; Imipenem; Levofloxacin; | lactam; |
| | | | | Moxifloxacin; Oxacillin; Penicillin | lincosamide; |
| | | | | G; Tobramycin | macrolide |
| 15 | 1362060 F | NC_017340.1 | 04_02981 | Ampicillin/Sulbactam; Cefepime; Cefotaxim; | aminoglycoside; |
| | | | | Cefuroxim; Ciprofloxacin; Clindamycin; | fluoroquinolone; |
| | | | | Erythromycin; Imipenem; Levofloxacin; | lactam; |
| | | | | Moxifloxacin; Oxacillin; Penicillin | lincosamide; |
| | | | | G; Tobramycin | macrolide |
| 16 | 1242653 R | NC_022222.1 | 6850 | Ampicillin/Sulbactam; Cefepime; Cefotaxim; | aminoglycoside; |
| | 1294527 R | NC_010079.1 | USA300_TCH1516 | Cefuroxim; Ciprofloxacin; Clindamycin; | fluoroquinolone; |
| | 1299554 R | NC_017340.1 | 04_02981 | Erythromycin; Imipenem; Levofloxacin; | lactam; |
| | | | | Moxifloxacin; Oxacillin; Penicillin | lincosamide; |
| | | | | G; Tobramycin | macrolide |
| 17 | 1252703 R | NC_021670.1 | Bmb9393 | Ampicillin/Sulbactam; Cefepime; Cefotaxim; | aminoglycoside; |
| | 1520285 F | NC_017351.1 | 11819_97 | Cefuroxim; Ciprofloxacin; Clindamycin; | fluoroquinolone; |
| | 1523326 F | NC_017340.1 | 04_02981 | Erythromycin; Imipenem; Levofloxacin; | lactam; |
| | | | | Moxifloxacin; Oxacillin; Penicillin | lincosamide; |
| | | | | G; Tobramycin | macrolide |
| 18 | 1619285 R | NC_017340.1 | 04_02981 | Ampicillin/Sulbactam; Cefepime; Cefotaxim; | aminoglycoside; |
| | 1661238 R | NC_010079.1 | USA300_TCH1516 | Cefuroxim; Ciprofloxacin; Clindamycin; | fluoroquinolone; |
| | | | | Erythromycin; Imipenem; Levofloxacin; | lactam; |
| | | | | Moxifloxacin; Oxacillin; Penicillin | lincosamide; |
| | | | | G; Tobramycin | macrolide |
| 19 | 1875550 F | NC_022222.1 | 6850 | Ampicillin/Sulbactam; Cefepime; Cefotaxim; | aminoglycoside; |
| | 2006001 F | NC_010079.1 | USA300_TCH1516 | Cefuroxim; Ciprofloxacin; Clindamycin; | fluoroquinolone; |
| | 1959494 F | NC_017340.1 | 04_02981 | Erythromycin; Imipenem; Levofloxacin; | lactam; |
| | | | | Moxifloxacin; Oxacillin; Penicillin | lincosamide; |
| | | | | G; Tobramycin | macrolide |
| 20 | 976788 F | NC_017340.1 | 04_02981 | Ampicillin/Sulbactam; Cefepime; Cefotaxim; | aminoglycoside; |
| | 878040 F | NC_007795.1 | NCTC_8325 | Cefuroxim; Ciprofloxacin; Clindamycin; | fluoroquinolone; |
| | | | | Erythromycin; Imipenem; Levofloxacin; | lactam; |
| | | | | Moxifloxacin; Oxacillin; Penicillin | lincosamide; |
| | | | | G; Tobramycin | macrolide |
| 21 | 2590222 R | NC_017340.1 | 04_02981 | Ampicillin/Sulbactam; Cefepime; Cefotaxim; | aminoglycoside; |
| | 2637689 R | NC_010079.1 | USA300_TCH1516 | Cefuroxim; Ciprofloxacin; Clindamycin; | fluoroquinolone; |
| | | | | Erythromycin; Imipenem; Levofloxacin; | lactam; |
| | | | | Moxifloxacin; Oxacillin; Penicillin | lincosamide; |
| | | | | G; Tobramycin | macrolide |
| 22 | 210528 R | NC_022222.1 | 6850 | Ampicillin/Sulbactam; Cefepime; Cefotaxim; | aminoglycoside; |
| | 267448 R | NC_017340.1 | 04_02981 | Cefuroxim; Ciprofloxacin; Clindamycin; | fluoroquinolone; |
| | 269814 R | NC_010079.1 | USA300_TCH1516 | Erythromycin; Imipenem; Levofloxacin; | lactam; |
| | | | | Moxifloxacin; Oxacillin; Penicillin | lincosamide; |
| | | | | G; Tobramycin | macrolide |
| 23 | 1814108 R | NC_017340.1 | 04_02981 | Ampicillin/Sulbactam; Cefepime; Cefotaxim; | aminoglycoside; |
| | | | | Cefuroxim; Ciprofloxacin; Clindamycin; | fluoroquinolone; |
| | | | | Erythromycin; Imipenem; Levofloxacin; | lactam; |
| | | | | Moxifloxacin; Oxacillin; Penicillin | lincosamide; |
| | | | | G; Tobramycin | macrolide |
| 24 | 170059 F | NC_002953.3 | MSSA476 | Ampicillin/Sulbactam; Cefepime; Cefotaxim; | aminoglycoside; |
| | 142263 F | NC_017337.1 | ED133 | Cefuroxim; Ciprofloxacin; Clindamycin; | fluoroquinolone; |
| | | | | Erythromycin; Imipenem; Levofloxacin; | lactam; |
| | | | | Moxifloxacin; Oxacillin; Penicillin | lincosamide; |
| | | | | G; Tobramycin | macrolide |
| 25 | 534953 F | NC_017340.1 | 04_02981 | Ampicillin/Sulbactam; Cefepime; Cefotaxim; | aminoglycoside; |
| | 543821 F | NC_010079.1 | USA300_TCH1516 | Cefuroxim; Ciprofloxacin; Clindamycin; | fluoroquinolone; |
| | | | | Erythromycin; Imipenem; Levofloxacin; | lactam; |
| | | | | Moxifloxacin; Oxacillin; Penicillin | lincosamide; |
| | | | | G; Tobramycin | macrolide |
| 26 | 517571 F | NC_017340.1 | 04_02981 | Ampicillin/Sulbactam; Cefepime; Cefotaxim; | aminoglycoside; |
| | 554542 F | NC_018608.1 | 08BA02176 | Cefuroxim; Ciprofloxacin; Clindamycin; | fluoroquinolone; |
| | | | | Erythromycin; Imipenem; Levofloxacin; | lactam; |
| | | | | Moxifloxacin; Oxacillin; Penicillin | lincosamide; |
| | | | | G; Tobramycin | macrolide |
| 27 | 531649 R | NC_017340.1 | 04_02981 | Ampicillin/Sulbactam; Cefepime; Cefotaxim; | aminoglycoside; |
| | 531398 R | NC_017351.1 | 11819_97 | Cefuroxim; Ciprofloxacin; Clindamycin; | fluoroquinolone; |
| | | | | Erythromycin; Imipenem; Levofloxacin; | lactam; |
| | | | | Moxifloxacin; Oxacillin; Penicillin | lincosamide; |
| | | | | G; Tobramycin | macrolide |
| 28 | 1050123 R | NC_007795.1 | NCTC_8325 | Ampicillin/Sulbactam; Cefepime; Cefotaxim; | aminoglycoside; |
| | 1147277 R | NC_017340.1 | 04_02981 | Cefuroxim; Ciprofloxacin; Clindamycin; | fluoroquinolone; |
| | | | | Erythromycin; Imipenem; Levofloxacin; | lactam; |
| | | | | Moxifloxacin; Oxacillin; Penicillin | lincosamide; |
| | | | | G; Tobramycin | macrolide |
| 29 | 1881161 R | NC_010079.1 | USA300_TCH1516 | Ampicillin/Sulbactam; Cefepime; Cefotaxim; | aminoglycoside; |
| | 1871101 R | NC_021059.1 | M1 | Cefuroxim; Ciprofloxacin; Clindamycin; | fluoroquinolone; |
| | 1759861 R | NC_022222.1 | 6850 | Erythromycin; Imipenem; Levofloxacin; | lactam; |
| | 1855493 R | NC_018608.1 | 08BA02176 | Moxifloxacin; Oxacillin; Penicillin | lincosamide; |
| | 1858794 R | NC_021554.1 | CC45 | G; Tobramycin | macrolide |
| | 1964828 R | NC_021670.1 | Bmb9393 | | |
| 30 | 2268723 F | NC_010079.1 | USA300_TCH1516 | Ampicillin/Sulbactam; Cefepime; Cefotaxim; | aminoglycoside; |
| | 2221448 F | NC_017340.1 | 04_02981 | Cefuroxim; Ciprofloxacin; Clindamycin; | fluoroquinolone; |
| | | | | Erythromycin; Imipenem; Levofloxacin; | lactam; |
| | | | | Moxifloxacin; Oxacillin; Penicillin | lincosamide; |
| | | | | G; Tobramycin | macrolide |
| 31 | 920768 F | NC_021059.1 | M1 | Ampicillin/Sulbactam; Cefepime; Cefotaxim; | aminoglycoside; |
| | 956878 F | NC_018608.1 | 08BA02176 | Cefuroxim; Ciprofloxacin; Clindamycin; | fluoroquinolone; |
| | 956978 F | NC_017340.1 | 04_02981 | Erythromycin; Imipenem; Levofloxacin; | lactam; |
| | 858255 F | NC_007795.1 | NCTC_8325 | Moxifloxacin; Oxacillin; Penicillin | lincosamide; |
| | | | | G; Tobramycin | macrolide |
| 32 | 2005634 F | NC_016912.1 | VC40 | Ampicillin/Sulbactam; Cefepime; Cefotaxim; | aminoglycoside; |
| | 2039052 F | NC_022222.1 | 6850 | Cefuroxim; Ciprofloxacin; Clindamycin; | fluoroquinolone; |
| | 2187801 F | NC_010079.1 | USA300_TCH1516 | Erythromycin; Imipenem; Levofloxacin; | lactam; |
| | | | | Moxifloxacin; Oxacillin; Penicillin | lincosamide; |
| | | | | G; Tobramycin | macrolide |
| 33 | 429303 F | NC_017340.1 | 04_02981 | Ampicillin/Sulbactam; Cefepime; Cefotaxim; | aminoglycoside; |
| | | | | Cefuroxim; Ciprofloxacin; Clindamycin; | fluoroquinolone; |
| | | | | Erythromycin; Imipenem; Levofloxacin; | lactam; |
| | | | | Moxifloxacin; Oxacillin; Penicillin | lincosamide; |
| | | | | G; Tobramycin | macrolide |
| 34 | 350202 F | NC_022222.1 | 6850 | Ampicillin/Sulbactam; Cefepime; Cefotaxim; | aminoglycoside; |
| | 402479 F | NC_017340.1 | 04_02981 | Cefuroxim; Ciprofloxacin; Clindamycin; | fluoroquinolone; |
| | 352104 F | NC_007795.1 | NCTC_8325 | Erythromycin; Imipenem; Levofloxacin; | lactam; |
| | | | | Moxifloxacin; Oxacillin; Penicillin | lincosamide; |
| | | | | G; Tobramycin | macrolide |
| 35 | 158073 F | NC_022226.1 | CN1 | Ampicillin/Sulbactam; Cefepime; Cefotaxim; | aminoglycoside; |
| | 193628 F | NC_021059.1 | M1 | Cefuroxim; Ciprofloxacin; Clindamycin; | fluoroquinolone; |
| | 138357 F | NC_022222.1 | 6850 | Erythromycin; Imipenem; Levofloxacin; | lactam; |
| | 196480 F | NC_010079.1 | USA300_TCH1516 | moxifloxacin; Oxacillin; Penicillin | lincosamide; |
| | 189192 F | NC_017340.1 | 04_02981 | G; Tobramycin | macrolide |
| 36 | 1121847 R | NC_017340.1 | 04_02981 | Ampicillin/Sulbactam; Cefepime; Cefotaxim; | aminoglycoside; |
| | 1024692 R | NC_007795.1 | NCTC_8325 | Cefuroxim; Ciprofloxacin; Clindamycin; | fluoroquinolone; |
| | | | | Erythromycin; Imipenem; Levofloxacin; | lactam; |
| | | | | Moxifloxacin; Oxacillin; Penicillin | lincosamide; |
| | | | | G; Tobramycin | macrolide |
| 37 | 2719339 R | NC_010079.1 | USA300_TCH1516 | Ampicillin/Sulbactam; Cefepime; Cefotaxim; | aminoglycoside; |
| | 2668764 R | NC_017340.1 | 04_02981 | Cefuroxim; Ciprofloxacin; Clindamycin; | fluoroquinolone; |
| | | | | Erythromycin; Imipenem; Levofloxacin; | lactam; |
| | | | | Moxifloxacin; Oxacillin; Penicillin | lincosamide; |
| | | | | G; Tobramycin | macrolide |
| 38 | 1388095 R | NC_022226.1 | CN1 | Ampicillin/Sulbactam; Cefepime; Cefotaxim; | aminoglycoside; |
| | | | | Cefuroxim; Ciprofloxacin; Clindamycin; | fluoroquinolone; |
| | | | | Erythromycin; Imipenem; Levofloxacin; | lactam; |
| | | | | Moxifloxacin; Oxacillin; Penicillin | lincosamide; |
| | | | | G; Tobramycin | macrolide |
| 39 | 1415365 R | NC_017340.1 | 04_02981 | Ampicillin/Sulbactam; Cefepime; Cefotaxim; | aminoglycoside; |
| | 1428821 R | NC_018608.1 | 08BA02176 | Cefuroxim; Ciprofloxacin; Clindamycin; | fluoroquinolone; |
| | 1318646 R | NC_007795.1 | NCTC_8325 | Erythromycin; Imipenem; Levofloxacin; | lactam; |
| | 1412563 R | NC_010079.1 | USA300_TCH1516 | Moxifloxacin; Oxacillin; Penicillin | lincosamide; |
| | 1381147 R | NC_021059.1 | M1 | G; Tobramycin | macrolide |
| 40 | 1678734 R | NC_017340.1 | 04_02981 | Ampicillin/Sulbactam; Cefepime; Cefotaxim; | aminoglycoside; |
| | 1720315 R | NC_010079.1 | USA300_TCH1516 | Cefuroxim; Ciprofloxacin; Clindamycin; | fluoroquinolone; |
| | | | | Erythromycin; Imipenem; Levofloxacin; | lactam; |
| | | | | Moxifloxacin; Oxacillin; Penicillin | lincosamide; |
| | | | | G; Tobramycin | macrolide |
| 41 | 1928346 F | NC_017340.1 | 04_02981 | Ampicillin/Sulbactam; Cefepime; Cefotaxim; | aminoglycoside; |
| | | | | Cefuroxim; Ciprofloxacin; Clindamycin; | fluoroquinolone; |
| | | | | Erythromycin; Imipenem; Levofloxacin; | lactam; |
| | | | | Moxifloxacin; Oxacillin; Penicillin | lincosamide; |
| | | | | G; Tobramycin | macrolide |
| 42 | 1376396 R | NC_010079.1 | USA300_TCH1516 | Ampicillin/Sulbactam; Cefepime; Cefotaxim; | aminoglycoside; |
| | 1323236 R | NC_022222.1 | 6850 | Cefuroxim; Ciprofloxacin; Clindamycin; | fluoroquinolone; |
| | 1315892 R | NC_022226.1 | CN1 | Erythromycin; Imipenem; Levofloxacin; | lactam; |
| | 1379143 R | NC_017340.1 | 04_02981 | Moxifloxacin; Oxacillin; Penicillin | lincosamide; |
| | 1399306 F | NC_021670.1 | Bmb9393 | G; Tobramycin | macrolide |
| 43 | 1124668 F | NC_017340.1 | 04_02981 | Ampicillin/Sulbactam; Cefepime; Cefotaxim; | aminoglycoside; |
| | 1121585 F | NC_010079.1 | USA300_TCH1516 | Cefuroxim; Ciprofloxacin; Clindamycin; | fluoroquinolone; |
| | | | | Erythromycin; Imipenem; Levofloxacin; | lactam; |
| | | | | Moxifloxacin; Oxacillin; Penicillin | lincosamide; |
| | | | | G; Tobramycin | macrolide |
| 44 | 559072 R | NC_017340.1 | 04_02981 | Ampicillin/Sulbactam; Cefepime; Cefotaxim; | aminoglycoside; |
| | 504007 R | NC_007795.1 | NCTC_8325 | Cefuroxim; Ciprofloxacin; Clindamycin; | fluoroquinolone; |
| | | | | Erythromycin; Imipenem; Levofloxacin; | lactam; |
| | | | | Moxifloxacin; Oxacillin; Penicillin | lincosamide; |
| | | | | G; Tobramycin | macrolide |
| 45 | 1675156 R | NC_017340.1 | 04_02981 | Ampicillin/Sulbactam; Cefepime; Cefotaxim; | aminoglycoside; |
| | | | | Cefuroxim; Ciprofloxacin; Clindamycin; | fluoroquinolone; |
| | | | | Erythromycin; Imipenem; Levofloxacin; | lactam; |
| | | | | Moxifloxacin; Oxacillin; Penicillin | lincosamide; |
| | | | | G; Tobramycin | macrolide |
| 46 | 1187805 F | NC_017340.1 | 04_02981 | Ampicillin/Sulbactam; Cefepime; Cefotaxim; | aminoglycoside; |
| | 1078815 F | NC_022113.1 | 55_2053 | Cefuroxim; Ciprofloxacin; Clindamycin; | fluoroquinolone; |
| | 1182930 F | NC_010079.1 | USA300_TCH1516 | Erythromycin; Imipenem; Levofloxacin; | lactam; |
| | | | | Moxifloxacin; Oxacillin; Penicillin | lincosamide; |
| | | | | G; Tobramycin | macrolide |
| 47 | 1356138 F | NC_017340.1 | 04_02981 | Ampicillin/Sulbactam; Cefepime; Cefotaxim; | aminoglycoside; |
| | | | | Cefuroxim; Ciprofloxacin; Clindamycin; | fluoroquinolone; |
| | | | | Erythromycin; Imipenem; Levofloxacin; | lactam; |
| | | | | Moxifloxacin; Oxacillin; Penicillin | lincosamide; |
| | | | | G; Tobramycin | macrolide |
| 48 | 854815 R | NC_007795.1 | NCTC_8325 | Ampicillin/Sulbactam; Cefepime; Cefotaxim; | |
| | 953539 R | NC_017340.1 | 04_02981 | Cefuroxim; Ciprofloxacin; Clindamycin; | |
| | 948900 R | NC_010079.1 | USA300_TCH1516 | Erythromycin; Imipenem; Levofloxacin; | |
| | | | | Moxifloxacin; Oxacillin; Penicillin | |
| | | | | G; Tobramycin | |
| 49 | 2459738 F | NC_017340.1 | 04_02981 | Ampicillin/Sulbactam; Cefepime; Cefotaxim; | aminoglycoside; |
| | 2364478 F | NC_022222.1 | 6850 | Cefuroxim; Ciprofloxacin; Clindamycin; | fluoroquinolone; |
| | | | | Erythromycin; Imipenem; Levofloxacin; | lactam; |
| | | | | Moxifloxacin; Oxacillin; Penicillin | lincosamide; |
| | | | | G; Tobramycin | macrolide |
| 50 | 1812380 R | NC_010079.1 | USA300_TCH1516 | Ampicillin/Sulbactam; Cefepime; Cefotaxim; | aminoglycoside; |
| | 1775835 R | NC_017340.1 | 04_02981 | Cefuroxim; Ciprofloxacin; Clindamycin; | fluoroquinolone; |
| | 1714993 R | NC_007795.1 | NCTC_8325 | Erythromycin; Imipenem; Levofloxacin; | lactam; |
| | | | | Moxifloxacin; Oxacillin; Penicillin | lincosamide; |
| | | | | G; Tobramycin | macrolide |

TABLE 4f
List of positions (corresponding to Table 3b, continued)

| No. | best_pv | GenomeName | fasta_header | SNPPositioninGenome | gene |
|---|---|---|---|---|---|
| 1 | 6.0168E−193 | 04_02981 | gi\|387149188\|ref\|NC_017340.1\| | 1958403 R | |
| | | USA300_TCH1516 | gi\|161508266\|ref\|NC_010079.1\| | 2004910 R | |
| 2 | 1.4167E−189 | 04_02981 | gi\|387149188\|ref\|NC_017340.1\| | 1641150 R | |
| 3 | 1.4167E−189 | 04_02981 | gi\|387149188\|ref\|NC_017340.1\| | 978538 F | |
| 4 | 1.4167E−189 | 04_02981 | gi\|387149188\|ref\|NC_017340.1\| | 705667 R | |
| 5 | 1.4167E−189 | 04_02981 | gi\|387149188\|ref\|NC_017340.1\| | 1434811 R | |
| 6 | 1.4167E−189 | 6850 | gi\|537441500\|ref\|NC_022222.1\| | 953696 R | |
| | | USA300_TCH1516 | gi\|161508266\|ref\|NC_010079.1\| | 1010027 R | rluA1 |
| 7 | 1.4167E−189 | Bmb9393 | gi\|521210823\|ref\|NC_021670.1\| | 2101899 R | |
| | | 04_02981 | gi\|387149188\|ref\|NC_017340.1\| | 1972149 R | |
| 8 | 1.4167E−189 | 04_02981 | gi\|387149188\|ref\|NC_017340.1\| | 208285 R | argC |
| | | NCTC_8325 | gi\|88193823\|ref\|NC_007795.1\| | 161011 R | argC |
| 9 | 1.4167E−189 | 11819_97 | gi\|385780298\|ref\|NC_017351.1\| | 2179136 R | |
| | | 04_02981 | gi\|387149188\|ref\|NC_017340.1\| | 2149064 R | |
| | | 08BA02176 | gi\|404477334\|ref\|NC_018608.1\| | 2107689 R | |
| 10 | 1.4167E−189 | 04_02981 | gi\|387149188\|ref\|NC_017340.1\| | 2358535 F | |
| 11 | 1.4167E−189 | 04_02981 | gi\|387149188\|ref\|NC_017340.1\| | 2023012 R | |
| 12 | 1.4167E−189 | NCTC_8325 | gi\|88193823\|ref\|NC_007795.1\| | 2777211 F | |
| | | 04_02981 | gi\|387149188\|ref\|NC_017340.1\| | 2779170 F | |
| 13 | 1.4167E−189 | 08BA02176 | gi\|404477334\|ref\|NC_018608.1\| | 1801995 R | |
| | | 04_02981 | gi\|387149188\|ref\|NC_017340.1\| | 1790672 R | |
| 14 | 3.0731E−189 | 04_02981 | gi\|387149188\|ref\|NC_017340.1\| | 1754561 F | |
| | | NCTC_8325 | gi\|88193823\|ref\|NC_007795.1\| | 1691742 F | |
| 15 | 3.1179E−189 | 04_02981 | gi\|387149188\|ref\|NC_017340.1\| | 1362060 F | |
| 16 | 3.7988E−189 | 6850 | gi\|537441500\|ref\|NC_022222.1\| | 1242653 R | |
| | | USA300_TCH1516 | gi\|161508266\|ref\|NC_010079.1\| | 1294527 R | ribC |
| | | 04_02981 | gi\|387149188\|ref\|NC_017340.1\| | 1299554 R | |
| 17 | 3.9683E−189 | Bmb9393 | gi\|521210823\|ref\|NC_021670.1\| | 1252703 R | |
| | | 11819_97 | gi\|385780298\|ref\|NC_017351.1\| | 1520285 F | |
| | | 04_02981 | gi\|387149188\|ref\|NC_017340.1\| | 1523326 F | |
| 18 | 3.9683E−189 | 04_02981 | gi\|387149188\|ref\|NC_017340.1\| | 1619285 R | |
| | | USA300_TCH1516 | gi\|161508266\|ref\|NC_010079.1\| | 1661238 R | |
| 19 | 3.9683E−189 | 6850 | gi\|537441500\|ref\|NC_022222.1\| | 1875550 F | |
| | | USA300_TCH1516 | gi\|161508266\|ref\|NC_010079.1\| | 2006001 F | bcp |
| | | 04_02981 | gi\|387149188\|ref\|NC_017340.1\| | 1959494 F | |
| 20 | 5.4236E−189 | 04_02981 | gi\|387149188\|ref\|NC_017340.1\| | 976788 F | |
| | | NCTC_8325 | gi\|88193823\|ref\|NC_007795.1\| | 878040 F | |
| 21 | 7.5452E−189 | 04_02981 | gi\|387149188\|ref\|NC_017340.1\| | 2590222 R | |
| | | USA300_TCH1516 | gi\|161508266\|ref\|NC_010079.1\| | 2637689 R | gntP |
| 22 | 9.5271E−189 | 6850 | gi\|537441500\|ref\|NC_022222.1\| | 210528 R | |
| | | 04_02981 | gi\|387149188\|ref\|NC_017340.1\| | 267448 R | |
| | | USA300_TCH1516 | gi\|161508266\|ref\|NC_010079.1\| | 269814 R | |
| 23 | 1.1093E−188 | 04_02981 | gi\|387149188\|ref\|NC_017340.1\| | 1814108 R | |
| 24 | 3.3279E−188 | MSSA476 | gi\|49484912\|ref\|NC_002953.31 | 170059 F | |
| | | ED133 | gi\|384546269\|ref\|NC_017337.1\| | 142263 F | |
| 25 | 3.3279E−188 | 04_02981 | gi\|387149188\|ref\|NC_017340.1\| | 534953 F | |
| | | USA300_TCH1516 | gi\|161508266\|ref\|NC_010079.1\| | 543821 F | |
| 26 | 3.5518E−188 | 04_02981 | gi\|387149188\|ref\|NC_017340.1\| | 517571 F | |
| | | 08BA02176 | gi\|404477334\|ref\|NC_018608.1\| | 554542 F | |
| 27 | 1.1492E−187 | 04_02981 | gi\|387149188\|ref\|NC_017340.1\| | 531649 R | |
| | | 11819_97 | gi\|385780298\|ref\|NC_017351.1\| | 531398 R | |
| 28 | 1.1509E−187 | NCTC_8325 | gi\|88193823\|ref\|NC_007795.1\| | 1050123 R | |
| | | 04_02981 | gi\|387149188\|ref\|NC_017340.1\| | 1147277 R | |
| 29 | 9.0648E−187 | USA300_TCH1516 | gi\|161508266\|ref\|NC_010079.1\| | 1881161 R | fmtB1 |
| | | M1 | gi\|479328021\|ref\|NC_021059.1\| | 1871101 R | |
| | | 6850 | gi\|537441500\|ref\|NC_022222.1\| | 1759861 R | |
| | | 08BA02176 | gi\|404477334\|ref\|NC_018608.1\| | 1855493 R | |
| | | CC45 | gi\|514064966\|ref\|NC_021554.1\| | 1858794 R | |
| | | Bmb9393 | gi\|521210823\|ref\|NC_021670.1\| | 1964828 R | |
| 30 | 1.5807E−186 | USA300_TCH1516 | gi\|161508266\|ref\|NC_010079.1\| | 2268723 F | |
| | | 04_02981 | gi\|387149188\|ref\|NC_017340.1\| | 2221448 F | |
| 31 | 3.6257E−174 | M1 | gi\|479328021\|ref\|NC_021059.1\| | 920768 F | rocD |
| | | 08BA02176 | gi\|404477334\|ref\|NC_018608.1\| | 956878 F | rocD |
| | | 04_02981 | gi\|387149188\|ref\|NC_017340.1\| | 956978 F | rocD |
| | | NCTC_8325 | gi\|88193823\|ref\|NC_007795.1\| | 858255 F | rocD |
| 32 | 3.9753E−174 | VC40 | gi\|379013365\|ref\|NC_016912.1\| | 2005634 F | |
| | | 6850 | gi\|537441500\|ref\|NC_022222.1\| | 2039052 F | |
| | | USA300_TCH1516 | gi\|161508266\|ref\|NC_010079.1\| | 2187801 F | rsbU |
| 33 | 7.1007E−174 | 04_02981 | gi\|387149188\|ref\|NC_017340.1\| | 429303 F | |
| 34 | 1.8906E−173 | 6850 | gi\|537441500\|ref\|NC_022222.1\| | 350202 F | |
| | | 04_02981 | gi\|387149188\|ref\|NC_017340.1\| | 402479 F | |
| | | NCTC_8325 | gi\|88193823\|ref\|NC_007795.1\| | 352104 F | |
| 35 | 3.0713E−172 | CN1 | gi\|537459744\|ref\|NC_022226.1\| | 158073 F | |
| | | M1 | gi\|479328021\|ref\|NC_021059.1\| | 193628 F | |
| | | 6850 | gi\|537441500\|ref\|NC_022222.1\| | 138357 F | |
| | | USA300_TCH1516 | gi\|161508266\|ref\|NC_010079.1\| | 196480 F | |
| | | 04_02981 | gi\|387149188\|ref\|NC_017340.1\| | 189192 F | |
| 36 | 4.4332E−172 | 04_02981 | gi\|387149188\|ref\|NC_017340.1\| | 1121847 R | |
| | | NCTC_8325 | gi\|88193823\|ref\|NC_007795.1\| | 1024692 R | |
| 37 | 4.4332E−172 | USA300_TCH1516 | gi\|161508266\|ref\|NC_010079.1\| | 2719339 R | |
| | | 04_02981 | gi\|387149188\|ref\|NC_017340.1\| | 2668764 R | |
| 38 | 5.5156E−172 | CN1 | gi\|537459744\|ref\|NC_022226.1\| | 1388095 R | |
| 39 | 1.2003E−171 | 04_02981 | gi\|387149188\|ref\|NC_017340.1\| | 1415365 R | |
| | | 08BA02176 | gi\|404477334\|ref\|NC_018608.1\| | 1428821 R | |
| | | NCTC_8325 | gi\|88193823\|ref\|NC_007795.1\| | 1318646 R | |
| | | USA300_TCH1516 | gi\|161508266\|ref\|NC_010079.1\| | 1412563 R | femB |
| | | M1 | gi\|479328021\|ref\|NC_021059.1\| | 1381147 R | |
| 40 | 1.2003E−171 | 04_02981 | gi\|387149188\|ref\|NC_017340.1\| | 1678734 R | |
| | | USA300_TCH1516 | gi\|161508266\|ref\|NC_010079.1\| | 1720315 R | |
| 41 | 1.2491E−171 | 04_02981 | gi\|387149188\|ref\|NC_017340.1\| | 1928346 F | |
| 42 | 2.3661E−171 | USA300_TCH1516 | gi\|161508266\|ref\|NC_010079.1\| | 1376396 R | sbcC |
| | | 6850 | gi\|537441500\|ref\|NC_022222.1\| | 1323236 R | |
| | | CN1 | gi\|537459744\|ref\|NC_022226.1\| | 1315892 R | |
| | | 04_02981 | gi\|387149188\|ref\|NC_017340.1\| | 1379143 R | |
| | | Bmb9393 | gi\|521210823\|ref\|NC_021670.1\| | 1399306 F | |
| 43 | 5.3408E−171 | 04_02981 | gi\|387149188\|ref\|NC_017340.1\| | 1124668 F | |
| | | USA300_TCH1516 | gi\|161508266\|ref\|NC_010079.1\| | 1121585 F | |
| 44 | 1.0222E−170 | 04_02981 | gi\|387149188\|ref\|NC_017340.1\| | 559072 R | |
| | | NCTC_8325 | gi\|88193823\|ref\|NC_007795.1\| | 504007 R | |
| 45 | 1.0498E−170 | 04_02981 | gi\|387149188\|ref\|NC_017340.1\| | 1675156 R | |
| 46 | 2.283E−170 | 04_02981 | gi\|387149188\|ref\|NC_017340.1\| | 1187805 F | |
| | | 55_2053 | gi\|532358222\|ref\|NC_022113.1\| | 1078815 F | |
| | | USA300_TCH1516 | gi\|161508266\|ref\|NC_010079.1\| | 1182930 F | |
| 47 | 2.3666E−170 | 04_02981 | gi\|387149188\|ref\|NC_017340.1\| | 1356138 F | |
| 48 | 4.1086E−170 | NCTC_8325 | gi\|88193823\|ref\|NC_007795.1\| | 854815 R | |
| | | 04_02981 | gi\|387149188\|ref\|NC_017340.1\| | 953539 R | |
| | | USA300_TCH1516 | gi\|161508266\|ref\|NC_010079.1\| | 948900 R | prsA1 |
| 49 | 4.2262E−169 | 04_02981 | gi\|387149188\|ref\|NC_017340.1\| | 2459738 F | |
| | | 6850 | gi\|537441500\|ref\|NC_022222.1\| | 2364478 F | |
| 50 | 1.3444E−168 | USA300_TCH1516 | gi\|161508266\|ref\|NC_010079.1\| | 1812380 R | dnaE2 |
| | | 04_02981 | gi\|387149188\|ref\|NC_017340.1\| | 1775835 R | |
| | | NCTC_8325 | gi\|88193823\|ref\|NC_007795.1\| | 1714993 R | |

TABLE 4g
List of positions (corresponding to Table 3b, continued)

| No. | AminoAcids | Codons | GenomeGI | Protein_GI |
|---|---|---|---|---|
| 1 | A_T | ACA_GCA | 387149188 | 446792191 |
| | A_T | ACA_GCA | 161508266 | 161510080 |
| 2 | E_K | AAA_GAA | 387149188 | 446032753 |
| 3 | I_M | ATC_ATG | 387149188 | 446312722 |
| 4 | E_K | AAG_GAG | 387149188 | 446725640 |
| 5 | A_S | GCA_TCA | 387149188 | 446180863 |
| 6 | L_P | CCT_CTT | 537441500 | 537465549 |
| | L_P | CCT_CTT | 161508266 | 161509205 |
| 7 | M_V | ATG_GTG | 521210823 | 752533903 |
| | M_V | ATG_GTG | 387149188 | 446753128 |
| 8 | K_T | AAA_ACA | 387149188 | 446556386 |
| | K_T | AAA_ACA | 88193823 | 88193961 |
| 9 | M_V | ATG_GTG | 385780298 | 446324804 |
| | M_V | ATG_GTG | 387149188 | 446324797 |
| | M_V | ATG_GTG | 404477334 | 446324791 |
| 10 | K_N | AAA_AAC | 387149188 | 445930822 |
| 11 | E_V | GAA_GTA | 387149188 | 446943955 |
| 12 | F_L | TTG_TTT | 88193823 | 88196623 |
| | F_L | TTG_TTT | 387149188 | 446800117 |
| 13 | Q_R | CAG_CGG | 404477334 | 446795417 |
| | Q_R | CAG_CGG | 387149188 | 446795407 |
| 14 | L_V | GTA_TTA | 387149188 | 446028277 |
| | L_V | GTA_TTA | 88193823 | 88195494 |
| 15 | I_N | AAT_ATT | 387149188 | 447178207 |
| 16 | I_T | ACC_ATC | 537441500 | 537465687 |
| | I_T | ACC_ATC | 161508266 | 161509438 |
| | I_T | ACC_ATC | 387149188 | 446786934 |
| 17 | L_S | TCA_TTA | 521210823 | 521258120 |
| | L_S | TCA_TTA | 385780298 | 446060496 |
| | L_S | TCA_TTA | 387149188 | 446060495 |
| 18 | N_S | AAT_AGT | 387149188 | 446940596 |
| | N_S | AAT_AGT | 161508266 | 161509778 |
| 19 | D_Y | GAT_TAT | 537441500 | 537465893 |
| | D_Y | GAT_TAT | 161508266 | 161510081 |
| | D_Y | GAT_TAT | 387149188 | 446862272 |
| 20 | F_L | TTA_TTT | 387149188 | 447047252 |
| | F_L | TTA_TTT | 88193823 | 88194665 |
| 21 | K_T | AAA_ACA | 387149188 | 446403560 |
| | K_T | AAA_ACA | 161508266 | 161510698 |
| 22 | A_V | GCA_GTA | 537441500 | 537465126 |
| | A_V | GCA_GTA | 387149188 | 447077358 |
| | A_V | GCA_GTA | 161508266 | 161508491 |
| 23 | A_V | GCG_GTG | 387149188 | 446784840 |
| 24 | G_R | AGA_GGA | 49484912 | 487756815 |
| | G_R | AGA_GGA | 384546269 | 446093782 |
| 25 | F_L | TTA_TTT | 387149188 | 446874184 |
| | F_L | TTA_TTT | 161508266 | 161508745 |
| 26 | K_R | AAA_AGA | 387149188 | 446973880 |
| | K_R | AAA_AGA | 404477334 | 446973883 |
| 27 | N_T | AAT_ACT | 387149188 | 446076361 |
| | N_T | AAT_ACT | 385780298 | 446076373 |
| 28 | F_L | TTA_TTT | 88193823 | 88194836 |
| | F_L | TTA_TTT | 387149188 | 446593607 |
| 29 | K_T | AAG_ACG | 161508266 | 161509974 |
| | K_T | AAG_ACG | 479328021 | 505394769 |
| | K_T | AAG_ACG | 537441500 | 537465850 |
| | K_T | AAG_ACG | 404477334 | 446973259 |
| | K_T | AAG_ACG | 514064966 | 514074897 |
| | K_T | AAG_ACG | 521210823 | 521258173 |
| 30 | L_S | TCA_TTA | 161508266 | 161510359 |
| | L_S | TCA_TTA | 387149188 | 446293068 |
| 31 | E_K | AAA_GAA | 479328021 | 505394709 |
| | E_K | AAA_GAA | 404477334 | 446089469 |
| | E_K | AAA_GAA | 387149188 | 446089454 |
| | E_K | AAA_GAA | 88193823 | 88194651 |
| 32 | I_V | ATA_GTA | 379013365 | 487720346 |
| | I_V | ATA_GTA | 537441500 | 537465949 |
| | I_V | ATA_GTA | 161508266 | 161510279 |
| 33 | G_V | GGA_GTA | 387149188 | 446343556 |
| 34 | K_T | AAA_ACA | 537441500 | 537465192 |
| | K_T | AAA_ACA | 387149188 | 446129782 |
| | K_T | AAA_ACA | 88193823 | 88194138 |
| 35 | I_V | ATT_GTT | 537459744 | 537467717 |
| | I_V | ATT_GTT | 479328021 | 505394663 |
| | I_V | ATT_GTT | 537441500 | 537465062 |
| | I_V | ATT_GTT | 161508266 | 161508437 |
| | I_V | ATT_GTT | 387149188 | 446513509 |
| 36 | I_T | ACA_ATA | 387149188 | 446104798 |
| | I_T | ACA_ATA | 88193823 | 88194808 |
| 37 | P_T | ACA_CCA | 161508266 | 161510779 |
| | P_T | ACA_CCA | 387149188 | 446083969 |
| 38 | C_Y | TAT_TGT | 537459744 | 686312170 |
| 39 | L_S | TCA_TTA | 387149188 | 446595763 |
| | L_S | TCA_TTA | 404477334 | 446595752 |
| | L_S | TCA_TTA | 88193823 | 88195101 |
| | L_S | TCA_TTA | 161508266 | 161509542 |
| | L_S | TCA_TTA | 479328021 | 505394733 |
| 40 | I_L | ATT_CTT | 387149188 | 446059917 |
| | I_L | ATT_CTT | 161508266 | 161509840 |
| 41 | A_G | GCA_GGA | 387149188 | 446506832 |
| 42 | I_T | ACT_ATT | 161508266 | 161509514 |
| | I_T | ACT_ATT | 537441500 | 537465718 |
| | I_T | ACT_ATT | 537459744 | 537467986 |
| | I_T | ACT_ATT | 387149188 | 446725826 |
| | I_T | ACT_ATT | 521210823 | 521258127 |
| 43 | I_L | ATA_TTA | 387149188 | 446710589 |
| | I_L | ATA_TTA | 161508266 | 161509291 |
| 44 | A_V | GCC_GTC | 387149188 | 446804811 |
| | A_V | GCC_GTC | 88193823 | 88194284 |
| 45 | D_N | AAT_GAT | 387149188 | 446305320 |
| 46 | I_T | ACA_ATA | 387149188 | 446462960 |
| | I_T | ACA_ATA | 532358222 | 532479591 |
| | I_T | ACA_ATA | 161508266 | 161509351 |
| 47 | E_Q | CAA_GAA | 387149188 | 446764090 |
| 48 | A_V | GCA_GTA | 88193823 | 88194648 |
| | A_V | GCA_GTA | 387149188 | 445957208 |
| | A_V | GCA_GTA | 161508266 | 161509155 |
| 49 | H_Y | CAT_TAT | 387149188 | 446198905 |
| | H_Y | CAT_TAT | 537441500 | 537466083 |
| 50 | D_E | GAA_GAT | 161508266 | 161509916 |
| | D_E | GAA_GAT | 387149188 | 446149063 |
| | D_E | GAA_GAT | 88193823 | 88195511 |

TABLE 4h
List of positions (corresponding to Table 3b, continued)

| | | | num_amino- | num_fluoro- | | | | num_tetra- |
|---|---|---|---|---|---|---|---|---|
| No. | best_pheno | best_pheno_class | glycoside | quinolone | num_lactam | num_lincosamide | num_macrolide | cycline |
| 1 | Moxifloxacin | fluoroquinolone | 1 | 3 | 7 | 1 | 1 | 0 |
| 2 | Moxifloxacin | fluoroquinolone | 1 | 3 | 7 | 1 | 1 | 0 |
| 3 | Moxifloxacin | fluoroquinolone | 1 | 3 | 7 | 1 | 1 | 0 |
| 4 | Moxifloxacin | fluoroquinolone | 1 | 3 | 7 | 1 | 1 | 0 |
| 5 | Moxifloxacin | fluoroquinolone | 1 | 3 | 7 | 1 | 1 | 0 |
| 6 | Moxifloxacin | fluoroquinolone | 1 | 3 | 7 | 1 | 1 | 0 |
| 7 | Moxifloxacin | fluoroquinolone | 1 | 3 | 7 | 1 | 1 | 0 |
| 8 | Moxifloxacin | fluoroquinolone | 1 | 3 | 7 | 1 | 1 | 0 |
| 9 | Moxifloxacin | fluoroquinolone | 1 | 3 | 7 | 1 | 1 | 0 |
| 10 | Moxifloxacin | fluoroquinolone | 1 | 3 | 7 | 1 | 1 | 0 |
| 11 | Moxifloxacin | fluoroquinolone | 1 | 3 | 7 | 1 | 1 | 0 |
| 12 | Moxifloxacin | fluoroquinolone | 1 | 3 | 7 | 1 | 1 | 0 |
| 13 | Moxifloxacin | fluoroquinolone | 1 | 3 | 7 | 1 | 1 | 0 |
| 14 | Moxifloxacin | fluoroquinolone | 1 | 3 | 7 | 1 | 1 | 0 |
| 15 | Moxifloxacin | fluoroquinolone | 1 | 3 | 7 | 1 | 1 | 0 |
| 16 | Moxifloxacin | fluoroquinolone | 1 | 3 | 7 | 1 | 1 | 0 |
| 17 | Moxifloxacin | fluoroquinolone | 1 | 3 | 7 | 1 | 1 | 0 |
| 18 | Moxifloxacin | fluoroquinolone | 1 | 3 | 7 | 1 | 1 | 0 |
| 19 | Moxifloxacin | fluoroquinolone | 1 | 3 | 7 | 1 | 1 | 0 |
| 20 | Moxifloxacin | fluoroquinolone | 1 | 3 | 7 | 1 | 1 | 0 |
| 21 | Moxifloxacin | fluoroquinolone | 1 | 3 | 7 | 1 | 1 | 0 |
| 22 | Moxifloxacin | fluoroquinolone | 1 | 3 | 7 | 1 | 1 | 0 |
| 23 | Moxifloxacin | fluoroquinolone | 1 | 3 | 7 | 1 | 1 | 0 |
| 24 | Moxifloxacin | fluoroquinolone | 1 | 3 | 7 | 1 | 1 | 0 |
| 25 | Moxifloxacin | fluoroquinolone | 1 | 3 | 7 | 1 | 1 | 0 |
| 26 | Moxifloxacin | fluoroquinolone | 1 | 3 | 7 | 1 | 1 | 0 |
| 27 | Moxifloxacin | fluoroquinolone | 1 | 3 | 7 | 1 | 1 | 0 |
| 28 | Moxifloxacin | fluoroquinolone | 1 | 3 | 7 | 1 | 1 | 0 |
| 29 | Moxifloxacin | fluoroquinolone | 1 | 3 | 7 | 1 | 1 | 0 |
| 30 | Moxifloxacin | fluoroquinolone | 1 | 3 | 7 | 1 | 1 | 0 |
| 31 | Moxifloxacin | fluoroquinolone | 1 | 3 | 7 | 1 | 1 | 0 |
| 32 | Moxifloxacin | fluoroquinolone | 1 | 3 | 7 | 1 | 1 | 0 |
| 33 | Moxifloxacin | fluoroquinolone | 1 | 3 | 7 | 1 | 1 | 0 |
| 34 | Moxifloxacin | fluoroquinolone | 1 | 3 | 7 | 1 | 1 | 0 |
| 35 | Moxifloxacin | fluoroquinolone | 1 | 3 | 7 | 1 | 1 | 0 |
| 36 | Moxifloxacin | fluoroquinolone | 1 | 3 | 7 | 1 | 1 | 0 |
| 37 | Moxifloxacin | fluoroquinolone | 1 | 3 | 7 | 1 | 1 | 0 |
| 38 | Moxifloxacin | fluoroquinolone | 1 | 3 | 7 | 1 | 1 | 0 |
| 39 | Moxifloxacin | fluoroquinolone | 1 | 3 | 7 | 1 | 1 | 0 |
| 40 | Moxifloxacin | fluoroquinolone | 1 | 3 | 7 | 1 | 1 | 0 |
| 41 | Moxifloxacin | fluoroquinolone | 1 | 3 | 7 | 1 | 1 | 0 |
| 42 | Moxifloxacin | fluoroquinolone | 1 | 3 | 7 | 1 | 1 | 0 |
| 43 | Moxifloxacin | fluoroquinolone | 1 | 3 | 7 | 1 | 1 | 0 |
| 44 | Moxifloxacin | fluoroquinolone | 1 | 3 | 7 | 1 | 1 | 0 |
| 45 | Moxifloxacin | fluoroquinolone | 1 | 3 | 7 | 1 | 1 | 0 |
| 46 | Moxifloxacin | fluoroquinolone | 1 | 3 | 7 | 1 | 1 | 0 |
| 47 | Moxifloxacin | fluoroquinolone | 1 | 3 | 7 | 1 | 1 | 0 |
| 48 | Moxifloxacin | fluoroquinolone | 1 | 3 | 7 | 1 | 1 | 0 |
| 49 | Moxifloxacin | fluoroquinolone | 1 | 3 | 7 | 1 | 1 | 0 |
| 50 | Moxifloxacin | fluoroquinolone | 1 | 3 | 7 | 1 | 1 | 0 |

[0360] In Tables 4a-h, the annotations are as above in Example 1 for Tables 2a and 2b, with the following extra annotations in the columns:

[0361] best_pheno: Phenotype (drug) with smallest adjusted p-value best_pheno_class: drug class of best drug (if phenotypes are drugs)

[0362] best_pv: adj. p-value of best phenotype calculated using Fishers exact test and adjusted by FDR (Benjamini Hochberg method (Benjamini Hochberg, 1995))

[0363] sign_phenos: names of all phenotypes with significant adj. p-value separated by “;”

[0364] sign_phenos_class: drug classes of all significant drugs (if phenotypes are drugs)

[0365] Further, in Tables 4a-h, all SNP are again non-synonymous (1=yes, 0=no), and the SNPs lie within a coding region (are “OnProtein”)

[0366] A genetic test for the combined pathogen identification and antimicrobial susceptibility testing direct from the patient sample can reduce the time-to actionable result significantly from several days to hours, thereby enabling targeted treatment. Furthermore, this approach will not be restricted to central labs, but point of care devices can be developed that allow for respective tests. Such technology along with the present methods and computer program products could revolutionize the care, e.g. in intense care units or for admissions to hospitals in general. Furthermore, even applications like real time outbreak monitoring can be achieved using the present methods.

[0367] Instead of using only single variants, a combination of several variant positions can improve the prediction accuracy and further reduce false positive findings that are influenced by other factors.

[0368] Compared to approaches using MALDI-TOF MS, the present approach has the advantage that it covers almost the complete genome and thus enables us to identify the potential genomic sites that might be related to resistance. While MALDI-TOF MS can also be used to identify point mutations in bacterial proteins, this technology only detects a subset of proteins and of these not all are equally well covered. In addition, the identification and differentiation of certain related strains is not always feasible.

[0369] The present method allows computing a best breakpoint for the separation of isolates into resistant and susceptible groups. The inventors designed a flexible software tool that allows to consider—besides the best breakpoints - also values defined by different guidelines (e.g. European and US guidelines), preparing for an application of the GAST in different countries.

[0370] The inventors demonstrate that the present approach is capable of identifying mutations in genes that are already known as drug targets, as well as detecting potential new target sites.

[0371] The current approach enables
[0372] a. Identification and validation of markers for genetic identification and susceptibility/resistance testing within one diagnostic test
[0373] b. Validation of known drug targets and modes of action
[0374] c. Detection of potentially novel resistance mechanisms leading to putative novel target/secondary target genes for new therapies

1. A method of determining an antimicrobial drug, e.g. antibiotic, resistance profile for a microorganism, particularly a bacterial microorganism, comprising:
obtaining or providing a first data set of gene sequences of a plurality of clinical isolates of the microorganism;
wherein at least a part of the gene sequences of the first data set are assembled;
analyzing the gene sequences of the first data set for genetic variants to obtain a third data set of genetic variants;
providing a second data set of antimicrobial drug, e.g. antibiotic, resistance and/or susceptibility of the plurality of clinical isolates of the microorganism;
correlating the third data set with the second data set and statistically analyzing the correlation; and
determining the genetic sites in the genome of the microorganism with antimicrobial drug, e.g. antibiotic, resistance.

2. The method of claim 1, wherein the genetic variants in the gene sequences of the first data set are single nucleotide polymorphisms (SNPs).

3. The method of claim 2, wherein the SNPs are detected alignment-free.

4. The method of claim 2 or 3, wherein the SNPs are annotated to a pan-genome of the microorganism and/or annotated to one or more reference genomes.

5. The method of any one of the preceding claims, wherein the microorganism is a Staphylococcus species, particularly Staphylococcus aureus, optionally wherein the antimicrobial drug is methicillin.

6. A diagnostic method of determining an infection of a patient with a microorganism, particularly a bacterial microorganism potentially resistant to antimicrobial drug treatment, comprising the steps of:
a) obtaining or providing a sample containing or suspected of containing a microorganism, particularly a bacterial microorganism, from the patient;
b) determining the presence of at least one genetic variant in at least one position of at least one genetic sequence of the microorganism, particularly bacterial microorganism, as determined by the method of any one of claims 1 to 5, wherein the presence of said at least one genetic variant is indicative of an infection with an antimicrobial drug resistant microorganism in said patient.

7. A method of selecting a treatment of a patient suffering from an infection with a potentially resistant microorganism, particularly bacterial microorganism, comprising the steps of:
a) obtaining or providing a sample containing or suspected of containing a microorganism, particularly a bacterial microorganism, from the patient;
b) determining the presence of at least one genetic variant in at least one position of at least one genetic sequence of the microorganism, particularly bacterial microorganism, as determined by the method of any one of claims 1 to 5, wherein the presence of said at least one genetic variant is indicative of a resistance to one or more antimicrobial drugs;
c) identifying said at least one or more antimicrobial drugs; and
d) selecting one or more antimicrobial drugs different from the ones identified in step c) and being suitable for the treatment of the infection with the microorganism, particularly the bacterial microorganism.

8. A method of acquiring, respectively determining, an antimicrobial drug, e.g. antibiotic, resistance profile for a clinical isolate of a microorganism, particularly a bacterial microorganism, comprising:
obtaining or providing at least one gene sequence of the clinical isolate of the microorganism, particularly the bacterial microorganism; and
determining the presence of genetic variants in the at least one gene sequence of the clinical isolate of the microorganism, particularly bacterial microorganism, as determined by the method of any one of claims 1 to 5.

9. Computer program product comprising computer executable instructions which, when executed, perform a method according to any one of claims 1 to 8.

10. A diagnostic method of determining an infection of a patient with a Staphylococcus species, particularly Staphylococcus aureus, potentially resistant to antimicrobial drug, e.g. antibiotic, treatment, comprising the steps of:
a) obtaining or providing a sample containing or suspected of containing at least one Staphylococcus species, particularly Staphylococcus aureus, from the patient;
b) determining the presence of at least one genetic variation in at least two positions from the group of positions annotated with Nos. 1-50 with regard to the reference genomes with the genome names given in Table 1, wherein the presence of said at least two genetic variations is indicative of an infection with an antimicrobial drug, e.g. antibiotic, resistant Staphylococcus, particularly Staphylococcus aureus, strain in said patient, wherein for some positions more than one position in different reference genomes is annotated.

11. A method of selecting a treatment of a patient suffering from an infection with a potentially resistant Staphylococcus species, particularly Staphylococcus aureus, comprising the steps of:
a) obtaining or providing a sample containing or suspected of containing at least one Staphylococcus, particularly Staphylococcus aureus, strain from the patient;
b) determining the presence of at least one genetic variation in at least two positions from the group of positions annotated with Nos. 1-50 with regard to the reference genomes with the genome names given in Table 1, wherein the presence of said at least two genetic variations is indicative of a resistance to one or more antimicrobial, e.g. antibiotic, drugs, wherein for some positions more than one position in different reference genomes is annotated;
c) identifying said at least one or more antimicrobial, e.g. antibiotic, drugs; and
d) selecting one or more antimicrobial, e.g. antibiotic, drugs different from the ones identified in step c) and being suitable for the treatment of a Staphylococcus, particularly Staphylococcus aureus, infection.

12. The method of claim 10 or 11, wherein the method involves determining the resistance of the Staphylococcus species, particularly Staphylococcus aureus, to one or more antimicrobial, e.g. antibiotic, drugs.

13. The method of one or more of claims 10 to 12, wherein the antimicrobial drug, e.g. antibiotic drug, is selected from the group consisting of β-lactams, β-lactam inhibitors, quinolines and derivatives thereof, e.g. fluoroquinolones, aminoglycosides, glycopeptides, lincosamides, macrolides, nitrofuranes, oxazolidinones polyketides, respectively tetracyclines, and folate synthesis inhibitors, e.g. benzene derived/sulfonamide antibiotics, particularly from the group consisting of Amoxicillin/Clavulanate, Ampicillin, Ampicillin/Sulbactam, Azithromycin, Cefalothin, Cefazolin, Cefepime, Cefotaxime, Cefoxitin, Ceftriaxone, Cefuroxime, Chloramphenicol, Ciprofloxacin, Clindamycin, Daptomycin, Ertapenem, Erythromycin, Fosfomycin, Fusidic acid, Gentamicin, Imipenem, Levofloxacin, Linezolid, Meropenem, Methicillin, Moxifloxacin, Mupirocin, Nitrofurantoin, Norfloxacin, Ofloxacin, Oxacillin, Penicillin G, Piperacillin/Tazobactam, Quinupristin/Dalfopristin, Rifampicin, Teicoplanin, Tetracycline, Tigecycline, Tobramycin, Trimethoprim/Sulfamethoxazole, and Vancomycin, particularly wherein the antimicrobial drug is Methicillin.

14. The method of one or more of claims 10 to 13, wherein the resistance of Staphylococcus aureus against 1, 2, 3, 4, 5, 6, 7, 8, 9, 10, 11, 12, 13, 14, 15 or 16, 17, 18, 19, 20 or more antibiotic drugs is determined.

15. The method of one or more of claims 10 to 14, wherein determining the nucleic acid sequence information or the presence of a genetic variation comprises determining a partial or entire sequence of the genome of the Staphylococcus species, particularly Staphylococcus aureus, wherein said partial or entire sequence of the genome comprises at least one of the positions with the genetic variation.

16. The method of one or more of the claims 10 to 15, wherein determining the nucleic acid sequence information or the presence of a genetic variation comprises using a next generation sequencing or high throughput sequencing method, preferably wherein a partial or entire genome sequence of the Staphylococcus, particularly Staphylococcus aureus, strain is determined by using a next generation sequencing or high throughput sequencing method.

17. A diagnostic method of determining an infection of a patient with a Staphylococcus species, particularly Staphylococcus aureus, potentially resistant to antimicrobial drug, e.g. antibiotic, treatment, comprising the steps of:
a) obtaining or providing a sample containing or suspected of containing at least one Staphylococcus, particularly Staphylococcus aureus, strain from the patient;
b) determining the presence of at least one genetic variation in at least two positions from the group of positions annotated with Nos. 1-50 with regard to the reference genomes with the genome names given in Tables 3a and/or 3b, wherein the presence of said at least two genetic variations is indicative of an infection with an antimicrobial drug, e.g. antibiotic, resistant Staphylococcus, particularly Staphylococcus aureus, strain in said patient, wherein for some positions more than one position in different reference genomes is annotated.

18. A method of selecting a treatment of a patient suffering from an infection with a potentially resistant Staphylococcus specias, particularly Staphylococcus aureus, comprising the steps of:
a) obtaining or providing a sample containing or suspected of containing at least one Staphylococcus, particularly Staphylococcus aureus, strain from the patient;
b) determining the presence of at least one genetic variation in at least two positions from the group of positions annotated with Nos. 1-50 with regard to the reference genomes with the genome names given in Tables 3a and/or 3b, wherein the presence of said at least two genetic variations is indicative of a resistance to one or more antimicrobial, e.g. antibiotic, drugs, wherein for some positions more than one position in different reference genomes is annotated;
c) identifying said at least one or more antimicrobial, e.g. antibiotic, drugs; and
d) selecting one or more antimicrobial, e.g. antibiotic, drugs different from the ones identified in step c) and being suitable for the treatment of a Staphylococcus, particularly Staphylococcus aureus, infection.

19. The method of claim 17 or 18, wherein the method involves determining the resistance of a Staphylococcus species, particularly Staphylococcus aureus, to one or more antimicrobial, e.g. antibiotic, drugs.

20. The method of one or more of claims 17 to 19, wherein the antimicrobial drug, e.g. antibiotic drug, is selected from the group consisting of β-lactams, β-lactam inhibitors, quinolines and derivatives thereof, e.g. fluoroquinolones, aminoglycosides, glycopeptides, lincosamides, macrolides, nitrofuranes, oxazolidinones polyketides, respectively tetracyclines, and folate synthesis inhibitors, e.g. benzene derived/sulfonamide antibiotics, particularly from the group consisting of Amoxicillin/Clavulanate, Ampicillin, Ampicillin/Sulbactam, Azithromycin, Cefalothin, Cefazolin, Cefepime, Cefotaxime, Cefoxitin, Ceftriaxone, Cefuroxime, Chloramphenicol, Ciprofloxacin, Clindamycin, Daptomycin, Ertapenem, Erythromycin, Fosfomycin, Fusidic acid, Gentamicin, Imipenem, Levofloxacin, Linezolid, Meropenem, Methicillin, Moxifloxacin, Mupirocin, Nitrofurantoin, Norfloxacin, Ofloxacin, Oxacillin, Penicillin G, Piperacillin/Tazobactam, Quinupristin/Dalfopristin, Rifampicin, Teicoplanin, Tetracycline, Tigecycline, Tobramycin, Trimethoprim/Sulfamethoxazole, and Vancomycin, particularly from the group consisting of Amoxicillin/Clavulanate, Ampicillin, Ampicillin/Sulbactam, Azithromycin, Cefalothin, Cefazolin, Cefepime, Cefotaxime, Cefoxitin, Ceftriaxone, Cefuroxime, Chloramphenicol, Ciprofloxacin, Clindamycin, Daptomycin, Ertapenem, Erythromycin, Fosfomycin, Fusidic acid, Gentamicin, Imipenem, Levofloxacin, Linezolid, Meropenem, Moxifloxacin, Mupirocin, Nitrofurantoin, Norfloxacin, Ofloxacin, Oxacillin, Penicillin G, Piperacillin/Tazobactam, Quinupristin/Dalfopristin, Rifampicin, Teicoplanin, Tetracycline, Tigecycline, Tobramycin, Trimethoprim/Sulfamethoxazole, and Vancomycin.

21. The method of one or more of claims 17 to 20, wherein the resistance of Staphylococcus aureus against 1, 2, 3, 4, 5, 6, 7, 8, 9, 10, 11, 12, 13, 14, 15 or 16, 17, 18, 19, 20 or more antibiotic drugs is determined.

22. The method of one or more of claims 17 to 21, wherein determining the nucleic acid sequence information or the presence of a genetic variation comprises determining a partial or entire sequence of the genome of the Staphylococcus, particularly Staphylococcus aureus, wherein said partial or entire sequence of the genome comprises at least one of the positions with the genetic variation.

23. The method of one or more of the claims 17 to 22, wherein determining the nucleic acid sequence information or the presence of a genetic variation comprises using a next generation sequencing or high throughput sequencing method, preferably wherein a partial or entire genome sequence of the Staphylococcus, particularly Staphylococcus aureus strain is determined by using a next generation sequencing or high throughput sequencing method.

The application's sequence listing, which the Patent Office published only in electronic form, follows.

SEQUENCE LISTING (14 sequences)

SEQ ID NO: 1 - DNA, 2821452 bp, Staphylococcus aureus 04-02981 (residues 1-1,410,726 of 2,821,452)
cgattaaagatagaaatacacgatgcgagcaatcaaatttcataacatcaccatgagtttggtccgaagcatgagtgtttacaatgtttgaataccttatacagttcttatacatactttataaattatttcccaagctgttttgatacactcactaacagatattctatagaaggaaaagttatccacttatgcacatttatagttttcagaattgtggataattagaaattacacacaaagttatactatttttagcaacatattcacaggtatttgacatatagagaactgaaaaagtataattgtgtggataagtcgtccaactcatgattttataaggatttatttattgatatttacataaaaatactgtgcataactaataagcaggataaagttatccaccgattgttattaacttgtggataattattaacatggtgtgtttagaagttatccacggctgttatttttgtgtataacttaaaaatttaagaaagatggagtaaatttatgtcggaaaaagaaatttgggaaaaagtgcttgaaattgctcaagaaaaattatcagctgtaagttactcaactttcctaaaagatactgagctttacacgattaaagatggtgaagctatcgtattatcgagtattccttttaatgcaaattggttaaatcaacaatatgctgaaattatccaagcaatcttatttgatgttgtaggctatgaagttaaacctcactttattactactgaagaattagcaaattatagtaataatgaaactgctactccaaaagaaacaacaaaaccttctactgaaacaactgaggataatcatgtgcttggtagagagcaattcaatgcccataacacatttgacacttttgtaatcggacctggtaaccgctttccacatgcagcaagtttagctgtagccgaagcaccagccaaagcgtacaatccattatttatctatggaggggttggtttaggaaaaacccatttaatgcatgccattggtcatcatgttttagataataatccagatgccaaagtgatttacacatcaagtgaaaaattcacaaatgaatttattaaatcaattcgtgataacgaaggtgaagctttcagagaaagatatcgtaatatcgacgtcttattaatcgatgatattcagttcatacaaaataaagtacaaacacaagaagaatttttctatacttttaatgaattgcatcagaataacaagcaaatagttatttcgagtgatcgaccaccaaaggaaattgcacaattagaagaccgattacgttcacgctttgaatgggggctaattgttgatattacgccaccagattatgaaactcgaatggcaattttgcagaagaaaattgaagaagaaaaattagatattccaccagaagctttaaattatatagcaaatcaaattcaatctaatattcgtgaattagaaggtgcattaacacgtttacttgcatattcacaattattaggaaaaccaattacaactgaattaactgctgaagctttaaaagatatcattcaagcaccaaaatctaaaaagattaccatccaagatattcaaaaaattgtaggccagtactataatgttaggattgaagatttcagtgcaaaaaaacgtacaaagtcaattgcatatccgcgtcaaatagctatgtacttgtctagagagcttacagatttctcattacctaaaattggtgaagaatttggtgggcgtgatcatacgaccgtcattcatgctcatgaaaaaatatctaaagatttaaaagaagatcctatttttaaacaagaagtagagaatcttgaaaaagaaataagaaatgtataagtaggaaactttgggaaatgtaatctgttatataacagcactaataataactgtcattttttacatttctatatactaatgtgacaagatgagcaaaactcattttgtggataatgtttaaaagtcatacacaccatacacaagttatcaacatgtgtataacttcgccaaatctatgtttttacgacttatccaccaatccacagcacctactactattactaagaacttaaaacctatataattatatataaacgactggaaggagttttaattaatgatggaattcactattaaaagagattattttattacacaattaaatgacacattaaaagctatttcaccaagaacaacattacctatattaactggtatcaaaatcgatgcgaaagaacatgaagttatactaactggttcagactctgaaatttcaatagaaatcactattcctaaaactgtagatggcgaagatattgtcaatatttcagaaacaggctcagtagtacttcctggacgattctttgttgatattataaaaaaattacctggtaaagatgttaaattatctacaaatgaacaattccagacattaattacatcaggtcattctgaatttaatttaagtggcttagatccagatcaatatcctttattacctcaagtttctagagatgacgcaattcaattgtcggtaaaagtgcttaaaaacgtgattgcacaaacgaattttgcagtgtccacctcagaaacacgcccagtactaactggtgtgaactggcttatacaagaaaatgaattaatatgcacagcgactgactcacaccgcttggctgtaagaaagttgcagttagaagatgtttctgaaaacaaaaatgtcatcattccaggtaaggctttagctgaattaaataaaattatgtctgacaatgaagaagacattgatatcttctttgcttcaaaccaagttttatttaaagttggaaatgtgaactttatttctcgattattagaaggacattatcctgatacaacacgtttattccctgaaaactatgaaattaaattaagtatagacaatggggagttttatcatgcgattgatcgtgcctctttattagcacgtgaaggtggtaataacgttattaaattaagtacaggtgatgacgttgttgaattatcttctacatcaccagaaattggtactgtaaaagaagaagttgatgcaaacgatgttgaaggtggtagcctgaaaatttcattcaactctaaatatatgatggatgctttaaaagcaatcgataatgatgaggttgaagttgaattcttcggtacaatgaaaccatttattctaaaaccaaaaggtgacgactcggtaacgcaattaattttaccaatcagaacttactaaaaataaatataaataaaggatgacgtgattaattaaaacgtcatcctttattttttggcaaaaataattctagatgcgtatgtaaaataaatttgacagcattttaaacagcaaataaaagacgccaattaaatttatgacaaatgtatccaaaatttaataagtgtgcttatatgccctttaaatttaaaattttaatagtcaataacaagttgaatattaaagttaaacgccgttaaatagcgttaaaaaattgaaaatgacagtattgccaaaaaataagaattaattatttatatgtaaacggtttctacctctattttaaatgaaatttgtgacaaaaaaaggtataatatattaatgacacacaaagaaatggagtgattattttggttcaagaagttgtagtagaaggagacattaatttaggtcaatttctaaaaacagaagggattattgaatctggtggtcaagcaaaatggttcttgcaagacgttgaagtattaattaatggagtgcgtgaaacacgtcgcggtaaaaagttagaacatcaagatcgtatagatatcccagaattacctgaagatgctggttctttcttaatcattcatcaaggtgaacaatgaagttaaatacactccaattagaaaattatcgtaactatgatgaggttacgttgaaatgtcatcctgacgtgaatatcctcattggagaaaatgcacaaggaaagacaaatttacttgaatcaatttataccttagctttagcaaaaagtcatagaacgagtaatgataaggaactcatacgttttaatgctgattatgctaaaatagaaggtgagcttagttatagacacggcacgatgccattaacaatgtttataactaaaaaaggtaaacaagtcaaagtgaatcacttagagcaaagtcgtctaactcaatatattggacacctcaatgtggttctatttgcgccagaagatttgaatattgtaaaaggctctcctcaaataagacgacgctttatagatatggagttgggccaaatttctgctgtttacttaaatgatttagctcaataccaacgtattttaaagcaaaagaataattacttaaagcagttacaattaggccaaaaaaaggacttaacaatgttggaagtattaaatcagcagtttgctgaatatgcaatgaaagtaactgataaacgtgcacattttattcaagagctagagtcgttagctaaaccgattcatgctggtatcacaaatgataaagaagtgttgtcgctaaattatttacctagtcttaaatttgattatgctcaaaatgaagcggcacgacttgaagaaattatgtctattcttagcgataatatgcaaagagaaaaagaacgaggcattagcttattcggaccacatcgagatgatataagttttgatgtgaatggcatggatgctcaaacatatggttctcaaggacagcaacgtacaacggctttgtccattaaattagctgaaattgagttaatgaatatcgaagttggggaatatcccatcttattattagacgatgtactcagtgaattagatgattcgcgtcaaacgcatttattaagtacgattcagcataaagtacaaacatttgtcactacgacatctgtagatggtattgatcatgaaatcatgaataacgctaaattgtatcgtattaatcaaggtgaaattataaagtaacagaaagcgatggtgactgcattgtcagatgtaaacaacacggataattatggtgctgggcaaatacaagtattagaaggtttagaagcagtacgtaaaagaccaggtatgtatataggatcgacttcagagagaggtttgcaccatttagtgtgggaaattgtcgataatagtatcgatgaagcattagctggttatgcaaataaaattgaagttgttattgaaaaagataactggattaaagtaacggataacggacgtggtatcccagttgatattcaagaaaaaatgggacgtccagctgtcgaagttattttaactgttttacatgctggtggtaaattcggcggtggcggatacaaagtatctggtggtttacatggtgttggttcatcagttgtaaacgcattgtcacaagacttagaagtatatgtacacagaaatgagactatatatcatcaagcatataaaaaaggtgtacctcaatttgacttaaaagaagttggcacaactgataagacaggtactgtcattcgttttaaagcagatggagaaatcttcacagagacaactgtatacaactatgaaacattacagcagcgtattagagagcttgctttcttaaacaaaggaattcaaatcacattaagagatgaacgtgatgaagaaaacgttagagaagactcctatcactatgagggcggtattaaatcgtacgttgagttattgaacgaaaataaagaacctattcatgatgagccaatttatattcatcaatctaaagatgatattgaagtagaaattgcgattcaatataactcaggatatgccacaaatcttttaacttacgcaaataacattcatacgtatgaaggtggtacgcatgaagacggattcaaacgtgcattaacgcgtgtcttaaatagttatggtttaagtagcaagattatgaaagaagaaaaagatagactttctggtgaagatacacgtgaaggtatgacagcaattatatctatcaaacatggtgatcctcaattcgaaggtcaaacgaagacaaaattaggtaattctgaagtgcgtcaagttgtagataaattattctcagagcactttgaacgatttttatatgaaaatccacaagtcgcacgtacagtggttgaaaaaggtattatggcggcacgtgcacgtgttgctgcgaaaaaagcgcgtgaagtaacacgtcgtaaatcagcgttagatgtagcaagtcttccaggtaaattagccgattgctctagtaaaagtcctgaagaatgtgagattttcttagtcgaaggggactctgccggggggtctacaaaatctggtcgtgactctagaacgcaggcgattttaccattacgaggtaagatattaaatgttgaaaaagcacgattagatagaattttgaataacaatgaaattcgtcaaatgatcacagcatttggtacaggaatcggtggcgactttgatctagcgaaagcaagatatcacaaaatcgtcattatgactgatgccgatgtggatggagcgcatattagaacattgttattaacattcttctatcgatttatgagaccgttaattgaagcaggctatgtgtatattgcacagccaccgttgtataaactgacacaaggtaaacaaaagtattatgtatacaatgatagggaacttgataaacttaaatctgaattgaatccaacaccaaaatggtctattgcacgatacaaaggtcttggagaaatgaatgcagatcaattatgggaaacaacaatgaaccctgagcaccgcgctcttttacaagtaaaacttgaagatgcgattgaagcggaccaaacatttgaaatgttaatgggtgacgttgtagaaaaccgtagacaatttatagaagataatgcagtttatgcaaacttagacttctaagcgctgtgaactgaacttttgaaggaggaactcttgatggctgaattacctcaatcaagaataaatgaacgaaatattaccagtgaaatgcgtgaatcatttttagattatgcgatgagtgttatcgttgctcgtgcattgccagatgttcgtgacggtttaaaaccagtacatcgtcgtatactatatggattaaatgaacaaggtatgacaccggataaatcatataaaaaatcagcacgtatcgttggtgacgtaatgggtaaatatcaccctcatggtgacttatctatttatgaagcaatggtacgtatggctcaagatttcagttatcgttatccgcttgttgatggccaaggtaactttggttcaatggatggagatggcgcagcagcaatgcgttatactgaagcgcgtatgactaaaatcacacttgaactgttacgtgatattaataaagatacaatagattttatcgataactatgatggtaatgaaagagagccgtcagtcttacctgctcgattccctaacttgttagccaatggagcatcaggtatagcggtaggtatggcaacgaatattccaccacataacttaacagaattaatcaatggtgtacttagcttaagtaagaaccctgatatttcaattgctgagttaatggaggatattgaaggtcctgatttcccaactgctggacttattttaggtaagagtggtattagacgtgcatatgaaacaggtcgtggttcaattcaaatgcgttctcgtgcagttattgaagaacgtggaggcggacgtcaacgtattgttgtcactgaaattcctttccaagtgaataaggctcgtatgattgaaaaaattgcagagctcgttcgtgacaagaaaattgacggtatcactgatttacgtgatgaaacaagtttacgtactggtgtgcgtgtcgttattgatgtgcgtaaggatgcaaatgctagtgtcattttaaataacttatacaaacaaacacctcttcaaacatcatttggtgtgaatatgattgcacttgtaaatggtagaccgaagcttattaatttaaaagaagcgttggtacattatttagagcatcaaaagacagttgttagaagacgtacgcaatacaacttacgtaaagctaaagatcgtgcccacattttagaaggattacgtatcgcacttgaccatatcgatgaaattatttcaacgattcgtgagtcagatacagataaagttgcaatggaaagcttgcaacaacgcttcaaactttctgaaaaacaagctcaagctattttagacatgcgtttaagacgtctaacaggtttagagagagacaaaattgaagctgaatataatgagttattaaattatattagtgaattagaaacaatcttagctgatgaagaagtattactacaattagttagagatgaattaacagaaattcgagatcgtttcggtgatgatcgtcgtactgaaatccaattaggtggatttgaagatttagaagatgaagatctcattccagaagaacaaattgtaattacactaagccataataactacattaaacgtttgccggtatctacatatcgtgctcaaaaccgtggtggtcgtggtgttcaaggtatgaatacattggaagaagattttgtcagtcaattggtaactttaagtacacatgaccatgtattgttctttactaacaaaggtcgtgtatacaaacttaaaggttatgaagtgcctgagttatcaagacagtctaaaggtattcctgtagtgaatgctattgaacttgaaaatgatgaagtcattagtacaatgattgctgttaaagaccttgaaagtgaagacaacttcttagtgtttgcaactaaacgtggtgtcgttaaacgttcagcattaagtaacttctcaagaataaatagaaatggtaagattgcgatttcgttcagagaagatgatgagttaattgcagttcgcttaacaagtggtcaagaagatatcttgattggtacatcacatgcatcattaattcgattccctgaatcaacattacgtcctttaggccgtacagcaacgggtgtgaaaggtattacacttcgtgaaggtgacgaagttgtagggcttgatgtagctcatgcaaacagtgttgatgaagtattagtagttactgaaaatggttatggtaaacgtacgccagttaatgactatcgtttatcaaatcgtggtggtaaaggtattaaaacagctacgattactgagcgtaatggtaatgttgtatgtatcactacagtaactggtgaagaagatttaatgattgttactaatgcaggtgtcattattcgactagatgttgcagatatttctcaaaatggtcgtgcagcacaaggtgttcgcttaattcgcttaggtgatgatcaatttgtttcaacggttgctaaagtaaaagaagatgcagaagatgaaacgaatgaagatgagcaatctacttcaactgtatctgaagatggtactgaacaacaacgtgaagcggttgtaaatgatgaaacaccaggaaatgcaattcatactgaagtgattgattcagaagaaaatgatgaagatggacgtattgaagtaagacaagatttcatggatcgtgttgaagaagatatacaacaatcatcagatgaagatgaagaataataaaaaaataagacttccctatatgtaggggagtcttatttttatgctagaaagtaatgctgtactatattcaatgattagtaatgattaactttctaattgtttcattgcgtaaggtatttcattgataagtcttgatggtggtaccacatacatatcttttgcaaggttttcgccaataaaactatgtgtatatgtggcactcataaccgcttcttttaagttatcaaattgaccgacaaaacttgtaatcataccagcaagtgtatcgcccataccaccagtcgccattgctgggctaccgattgttaatttaaagtcttcatctttaaagaaaatttcagtaccatgttttttaagtacaacagttgcacctaaacgatcaactgcttcacgattacgctcatatgtctgttcctcaataggaataccacttaatcgttcccattctttgaggtgtggagtaaagatcacacgacatgtaggtaattgcggtttcagtttactaaagattgtaatcgcatcgccgtctacgattaaattttgatgcggttgtatattttgtagtaggaatgtaatggcattatttcctttgaaatcaacgccaagacctggaccaattagtatactgtcagtcatttcaatcattttcgtcaacattttcgtatcattaatatcaataaccatcgcttctgggcaacgagaatgtaatgctgaatgatttgttggatgtgtagctacagtgattaaaccactaccgctaaatacacatgcacgagccgctaacataatggcaccacctaagttagcagatccaccaattaataaaattttgccataatcacctttatgtgaatcttctttacgcttaggaatgttaatagaatttaacgtttccatagtgatataacctcccatgtaaaagccttttccaaatttattcaattttaaaaatatatagtaacttttaacaaaatgtattataaatttctgaattcattattatttgtcgttaaatacaatagaaaatactatacctgtatatgcaattcgtcaatagataaattattaaatatgcttacaacaatcttaatatcctttaacgcactacaatagtgctctgataataggttataaatgtacgtaaaaccattgtttcaataaaaatgaaaacgtatacttcaagaaggatgggttacttaatataaacaagggggtaacatatatgactttatatttagatggtgaaacactaacaattgaggatattaaatcatttttacaacaacaatcaaagattgaaattattgatgatgcgttagaacgtgtcaaaaaaagtagagcggtagttgaacgtattattgaaaatgaggaaacggtttacggtatcactacaggttttgggttatttagtgatgtacgtatagacccgacgcaatataatgaattacaagtgaatctgatacgctcacatgcctgtggactaggtgagccattttcaaaagaagtagcattagtcatgatgattttacgattgaatacattattaaaaggtcattcaggtgccactttagaattagtgagacaattacaattttttataaatgaacgtattataccgataatcccacaacaaggctctctcggtgcatcaggagatttagcgccattatcacatttagcattagcattaattggtgaagggaaagtattgtacagaggggaagaaaaggatagtgacgatgtattaagagaattaaatagacaacctttgaaccttcaggctaaagagggtttagcattgattaatggtacgcaagctatgacagctcaaggtgtcattagttatatagaagcagaagatttaggttaccaatctgaatggattgctgcattaacgcatcagtctcttaatggcattatagatgcatatcgacatgatgtgcactctgttcgtaattttcaagaacagattaatgtggcagcgcgtatgcgtgattggttagaaggatcaacattaacgacgcgacaagcagaaatacgtgtacaagatgcatatacgttgcgttgtataccacaaatccatggcgcgagttttcaagtattcaattatgttaaacagcaattagaatttgaaatgaatgcggctaatgataatccacttatatttgaggaagcaaatgaaacgtttgttatttcaggtggtaacttccatggacaacctattgcttttgcattagatcatcttaaattaggtgtaagtgaattagcaaacgtatcggaacgtcgtctagagcgactagtaaatcctcaattaaatggtgatttaccagcatttcttagtccagagccaggattgcaaagtggcgcgatgattatgcaatatgctgctgcaagtctcgtttctgaaaataaaactttagcgcatccagcgagtgttgattctatcacttcatctgcgaaccaagaagatcacgtatctatgggaactacagctgctagacatggttatcaaattattgaaaatgcaagacgtgtgttggcaatcgaatgtgttattgcattacaagcagcagagttgaaaggtgtcgaaggattatcaccaaaaacacgtcgtaaatatgaggagtttcgaagtatcgtgccatccattacacatgaccgtcaatttcataaagatattgaagcggttgcacagtatttaaagcaatcaatttatcaaacgactgcatgtcactaaatcgacatgagtgatgtttgaaatcgttacttgaaaaagcaaatatagtttgctatattaaaattaacttaataagacattgttcgtaggacaagtaatatatagtgttcgatatcagagagcttgtggttagtgtgaacaagaatcaacatatatatgaatctacctacttaatttaaaagaacaatcggtgataaccgttattttagtgaagtgcaatttaggtttagtgtatctttataacttaaattgttaaatagggtggcaacgcgtagaccacgtcccttgtagggatgtggtctttttttattttctaaaaaataaagacgtacgtcattccataataaatgataattatttgggaaaggatgaaggttaatgttagacattagattattcagaaatgagcctgacacagttaagagcaaaattgaattacgtggagatgatccaaaagttgtagatgaaattttagaattggatgagcaacgacgtaaattaattagtgcaacagaagaaatgaaagcacgtcgtaataaagtaagcgaagaaatcgcattaaaaaaacgtaataaagaaaatgctgatgatgtgattgctgaaatgcgcacattaggtgacgatattaaagaaaaagatagtcaattaaatgaaattgataataaaatgacaggtatcctttgtcgtattccaaatttaataagtgatgatgtacctcaaggtgaatctgatgaagataacgttgaagttaaaaagtggggtacaccacgtgagttttcatttgaaccaaaagcacattgggatattgtagaagaattgaaaatggctgattttgatcgtgcagcaaaagtttcaggtgcgcgttttgtatatttaacaaatgaaggtgcgcaattagagcgtgctttaatgaactatatgattacaaaacatacaacacaacatggttatacagaaatgatggtaccacagcttgtgaacgcagatacaatgtatggtacaggtcaattacctaaatttgaagaagatttatttaaagtagaaaaagaaggattatatacaattccaactgctgaagtaccattaacgaatttctaccgtaatgaaattattcaaccaggtgtacttcctgaaaaattcactggtcaatctgcatgtttccgtagtgaagcaggatcagcaggtagagatacaagaggattaattcgtttacatcaattcgataaagtggaaatggtacgttttgaacaacctgaagattcatggaatgctttagaagaaatgacaacaaatgcagaagcaattctagaagagttaggtttaccataccgtcgtgttattttatgtacaggtgatattggatttagtgcaagcaaaacatatgatatagaagtttggttaccaagctacaatgattataaagaaattagttcatgctcaaactgtacggatttccaagcgcgtcgtgctaacatccgcttcaagcgtgacaaagcagctaaaccagaattagcacatacattaaatggtagtggtttagcagttggacgtacatttgctgctattgttgaaaattaccaaaatgaagatggaacagtaacaattccagaagcattagtaccatttatgggtggtaaaacacaaatttcaaaaccagttaaataaaggctttagctacaagctttaaaaagtatatattctacgtatacttaaagcaagggcaagatactttaaataatattttaaaaagtggtgacgaagctgtcgccactttttttgtgctgtaaaagtataatagtgagccaatgcacataacaacaataaattaagtttgtggtttaatggggtgaacgcatttcattatagcaacaatacgggataattatgatgaactaaaacaatctaaaacgtaacaattttgagcatcactattataggaaattaagtgataaaaaactgatttcgttgatgtagtatgagtaatatcgatggagtagggtagggggagaggatgatgattataagggagtgttacatgaatcaatatcccagactcatcattagatataaaaaattataaaattagtacttaaaaacaactacaaatccgtagaaaatatggaggtagtcttaaataaaaattgaaaattatcaaaaataaaaagttgatatgaagatgattgaagacgccagtatgtctaacctcagacaaactggtgtctaatgttattgcttagggtatagaactgtattagactaggtatattattttttcgtaattatataaatataaagtggcaaaggaggtaattgagatggcaacacatttaagttttagacaaggcgtacaagagtgtatcccaacattattgggttatgccggtgttggtatttcatttggtattgtggcttcgtctcaaaactttagtattttagaaattatcttgttatgtcttgttatatatgccggtgctgcgcaatttattatgtgcgcgttgtttatagcaggtacaccgatatcagcgattgtactaactgtatttatcgtaaattcaagaatgttccttttaagtatgtcgcttgcaccaaacttcaagacatatgggttttggaaccgtgttggattaggttcattagtaactgacgaaacgtttggcgtcgccattacaccttatttaaaaggagaagctatcaatgatcgttggatgcatggtcttaatatcacagcatatttattttgggcaatttcatgtgtagctggggctttatttggcgaatatatctcaaatccgcaaacgctagggttagattttgctatcacggctatgtttatctttttggccattgcgcaatttgaatcaattactaaatcgcgattaagaatttacatagtactcattattgccgtcatagtaatgatgttatcgctaagtatgtttatgccttcatatctagcaatattaattgcagccacaatttcagcagcgttaggagtgatgatggaacaatgataactcatatgaacatgttaatacttattttattgtgtggtatcgtaacgctattaattcgaattataccttttatcatgatttcaaaagtgcaattgcctgatgttgtggttcgatggctatcatttatcccaatcacactatttacggcacttgtcattgacagcattattcaacagacgcctcatggtgaggggtatacattaaacatcccttacattatcgcgctcattccgacggttattttatctataatcacgcgtagtttaactattacaattattagtgggattgttatcatggcaacattacgatttttcttttaaaaataactgaaaatcattgaacagatatttaaacttaggtaaactgttagtaatcagaaaattctgatatacaaatcgtctatggtatgactgggaatcgtatacacgaaagcgatttggctaacgtatgacaatgataacaatattttaaatgataaaagtaattcatcactgaatctcaactaacacataacaatttcatatttcttattgtgagaagttgagggacttggccctgtgatacttcagcaaccgactttatagcacggtgctaaaaccaacgagttactcgaatgataagtataaagacttcttacttttcaatagggtgagaagtttttttgtttaaggaggaaagaacaatgacaaattacacagtagatactttaaatctagggaaatttattacagaatctggggaagtcatagataacttgcgtttgagatatgagcatgttggttatcatggacaaccattagttgtagtttgtcatgcattaactggcaatcatttaacatatggaacagatgattatccgggttggtggcgagaaattattgatgggggatatatacccattcacgattatcaatttttaacatttgatgttattggtagtcctttcggttcaagttcacctttaaacgaccctcattttcctaaaaaattaacattaagagatatagtcagagcgaatgaacgaggtatacaagcccttggttatgataagattaatattttaatagggggaagtcttggaggtatgcaagcaatggaactactttacaatcaacagtttgaagtagataaagccattatccttgctgcaacaagtcgaacatcatcttatagtagagctttcaatgaaattgcaaggcaagccattcatcttggtggtaaggaaggtctaagtattgcacgccaattaggttttttgacatatcgatcatcaaaaagttatgatgaacgtttcacgccggatgaagtagtcgcataccaacaacatcaaggtaataaatttaaagaacattttgatttgaattgttatctgacactgctagatgtattggatagtcacaacattgaccgaggtcgcacagacgtaacgcatatttttaaaaatttagaaacgaaagtcttaacgatggggttcatagatgatttgctatatccggacgatcaagttcgtgcattaggtgaacgttttaaatatcatcgtcatttcttcgtgcctgataatgttggacatgatggattcctactaaactttagtacctgggcacctaacttatatcatttcttaaatttaaagcattttaagcgtaagtaataatgtatatatttttaaagaatgaagctactaaatcacagttatcatattcaaagacatctagagtacatgagagtggaaatgaattgtaaatctaaatcaagcttgattgctatgtagtgggattaaataatcatgttgaaaatgaaagcacacaaaagcgattcaaatgagtatgttaattacttataaaacatgaaagttattattcaattaaatgaaatagaagcatacaatctataaattgttaatttccattaaagaggttaaaataatagctatagttaaaaatatgggagtggcttatgtgttttcaaaaatacaacctaaagcaacaataattgcaacgattacgttggtatttgtcgctttagctttatatctagtgcctggtttgggactaatatttgcattatttgcaaccataccaggtatcgttttatggaataaatcaatacaatctttcggggttagtgcacttattacagtaattataacaactgttttaggtaatactttcgttttaagtgccatcatattagtcttaattgcaagtttaattattggtcaattgctcaaagaaagaacgtctaaagaaagaatgttatacgtaacaacagtagcgatgagcttaatttcattaatcgcttttatgttactacaaacattcggaaggattccaccatcagcgagcatagtaaaacctttcaagcaaacattacatgaagcgattacgatgagcggtgccgatgcgaatatgacccaaatattagaagaagggtttagacaagcgaccgttcaattaccaggtttcatcattatcattacatttttaatcgtcttaattaacttaatcgttacatttccggttttacgaaaatttaaaatcgctacacctgtatttaagccacttttcgcgtggcaaatgagcggtattttattatggatatacattattgttatcatatgtttattatttacaggtcaaccgagtgtgttccagagcattcttttaaacttccaacttgtgttatcattagtaatgtatattcaaggtttaagtgttattcatttctttggtaaagcgaaaggtttgccgaatgcagtaacgattttactattgattatcggtacaatactgacacctacgacacatattgtaggactacttggtgttatcgatttaagtttgaatttgaagcgaatcatgaaaaataattctaaaaagtgaatagaggtggaataatgaatcggcagtccactaagaaagctttactaataccatttgtcatcatgatcatcacagcaattgttttaatgggtgtatggtttatctttaatagtcttatagcattaattgcatctatcgttcttgtcgtgatgattattgttagcatcattttattcagacaagctttaatgaaaatggatagttatgtagatggtttgagtgctcaaatttcaacaacaaataataaagcaatcaaacatttaccaattggtatcattgttttagatgaaaatgatcacatcgaatgggttaaccaatttatgacaaatcatatggaagcaaatgtcatttctgaatctgtaaatgaagtatttccaaacattttaaagcaattagatagagtgaaatccgttgaaatagaatataatcagtatcatttccaagtacgttattctgagaatgatcattgcctctatttctttgatataactgaacaagtacaaacaaatgaactatatgaaaattctaaaccaatcattgcgacattatttttagataactacgatgagattactcaaaatatgaatgatacgcagcgttcggaaatcaattcaatggtaacgcgtgttattagtcgatgggcaactgagtataatatattctttaaaaggtatagttccgatcaattcgtagcctatttaaatcaaaaaatattagctgacttagaagaatctaaatttgatatcttgagtcaattacgtgaaaaaagtgttggttatcgtgcccaattaacattaagtattggtgttggtgaaggtactgaaaatttaatcgatttaggtgaattatcacaatcaggcctagacttagcattagggcgcggtggcgaccaagttgcaattaaaagtattaatggtaatgtgcgtttctatggcggtaagactgacccgatggagaaacgtactcgtgtaagagcacgagtgatctcacatgcgttaaaagatatccttgcagagggtgacaaagtcattatcatgggacataaacgtcctgacttagatgcaattggtgcagcaatcggtgtgtctagatttgcaatgatgaataatttagaagcatacatcgtattaaatgagactgacattgatccaacattacgacgcgtgatgaacgaaattgataaaaagtcagagttaagagagcgatttataacatcagatgatgcttgggatatgatgacatctaagacaaccgtagtgattgttgatacgcataaaccggaactggttttagatgaaaatgtcttaaataaagcaaaccgtaaagttgttatcgatcatcatagacgtggtgaaagcttcatctctaatccattgttgatatatatggaaccatacgcaagttcaacagctgaattggtaacagagttactggaatatcaaccaacagaacaacgtttaacacgtcttgaatcaacagtgatgtatgcaggtattattgtagatacaagaaactttacattacgaacaggatcaagaacattcgatgcagcgagttatttacgtgcacatggtgcagatacgattttaacgcaacatttcttaaaagatgatgtggatacttacattaatcgatctgaattaattcgaactgtaaaagttgaagataatggcatagccattgcgcatggttcagacgataaaatttatcatccagtaacagttgcacaagcagcagatgaactgttaagtttagaaggtattgaagcatcatatgttgttgcgagacgtgaagataatctgattggtatatctgcgcgttcactcggttcagtaaatgttcagttaacaatggaagcacttggtggcggtggacatttaaccaatgctgcaacacaacttaaaggtgtgacagtcgaagaggcgatagcacaattacaacaagcaattacagaacaattaagtaggagtgaagatgcatgaaagtaatttttacacaagatgttaaaggtaaaggtaaaaaaggtgaagttaaagaagtaccagtaggttatgcaaataacttcttattgaaaaagaattatgctgtagaagcaacaccaggtaaccttaaacaattagagttacagaaaaaacgtgcaaaacaagaacgccaacaagaaattgaagatgctaaagcattaaaagaaacgttatcaaacattgaagttgaagtatcagcaaaaactggtgaaggtggtaaattgtttggatcagtaagtacaaaacaaattgccgaagcactaaaagcacaacatgatattaaaattgataaacgtaaaatggatttaccaaatggaattcattccctaggatatacgaatgtacctgttaaattagataaagaagttgaaggtacaattcgcgtacacacagttgaacaataaagttggattgaaataagaggtgtaaccattcatggatagaatgtatgagcaaaatcaaatgccacataacaatgaagctgaacagtctgtcttaggttcaattattatagatccagaattgattaatactactcaggaagttttgcttcctgagtcgttttataggggtgcccatcaacatattttccgtgcaatgatgcacttaaatgaagataataaagaaattgatgttgtaacattgatggatcaattatcgacggaaggtacgttgaatgaagcgggtggcccgcaatatcttgcagagttatctacaaatgtaccaacgacgcgaaatgttcagtattatactgatatcgtttctaagcatgcattaaaacgtagattgattcaaactgcagatagtattgccaatgatggatataatgatgaacttgaactagatgcgattttaagtgatgcagaacgtcgaattttagagctatcatcttctcgtgaaagcgatggctttaaagacattcgagacgtcttaggacaagtgtatgaaacagctgaagagcttgatcaaaatagtggtcaaacaccaggtatacctacaggatatcgagatttagaccaaatgacagcagggttcaaccgaaatgatttaattatccttgcagcgcgtccatctgtaggtaagactgcgttcgcacttaatattgcacaaaaagttgcaacgcatgaagatatgtatacagttggtattttctcactagagatgggtgctgatcagttagccacacgtatgatttgtagttctggtaatgttgactcaaaccgcttaagaacgggtactatgactgaggaagattggagtcgttttactatagcggtaggtaaattatcacgtacgaagatttttattgatgatacaccgggtattcgaattaatgatttacgttctaaatgtcgtcgattaaagcaagaacatggcttagacatgattgtgattgactacttacagttgattcaaggtagtggttcacgtgcgtccgataacagacaacaggaagtttctgaaatctctcgtacattaaaagcattagcccgtgaattagaatgtccagttatcgcattaagtcagttatctcgtggtgttgaacaacgacaagataaacgtccaatgatgagtgatattcgtgaatctggttcgattgagcaagatgccgatatcgttgcattcttataccgtgatgattactataaccgtggcggcgatgaagatgatgacgatgatggtggtttcgagccacaaacgaatgatgaaaacggtgaaattgaaattatcattgctaagcaacgtaacggtccaacaggcacagttaagttacactttatgaaacaatataataaatttaccgatatcgattatgcacatgcagatatgatgtaaaaaagtttttccgtacaataatcattaagatgataaaattgtacggtttttattttgttctgaacgggttgatatatgttaagtttgtgtattgaaagtgataaattagtactgtcaacgcctctgttaaagggtttttaggacgttgaagacgatttgttaaaatgatttttcttttaaaaaggccgaaaatcaatgttcgatttttatttgcattatggtctcgatattggtagaatatcaaatggttaaatgagaaaaacttggaggtgctcacatgtcatcaatcgtagtagttgggacacaatggggagacgaaggaaaaggaaaaataacggatttcttggcagaacagtcagatgttatcgcgcgtttttcaggtggtaataatgcaggccataccattcaatttggcggagaaacatataaattacatttagtaccatctggtatcttttacaaagacaaattagcggtaatcggtaacggtgtcgttgttgatccagttgcactattgaaagaattagacggattaaatgaacgtggcattcctacaagtaatttacgtatatctaatcgtgcgcaagtgattttaccatatcacttagcacaagatgaatatgaagaacgtttacgcggtgacaataagattggtacaactaaaaaaggtatcggtccagcatatgtagacaaagttcaacgtatcggtattcgtatggcagatttacttgaaaaagaaacattcgaaagattattaaaatcaaacattgaatataaacaagcatatttcaaaggtatgtttaacgaaacatgtccatcatttgatgatatctttgaagaatactatgctgcaggtcaacgtttaaaagaatttgtaacagacacatcaaaaatcttagacgatgcatttgtagcagatgaaaaggtacttttcgaaggtgcgcaaggtgtaatgttagatatcgaccatggtacatatccattcgttacatcaagtaatccaattgcaggtaacgttactgttggtacaggtgtaggtcctacattcgtttcgaaggtaattggtgtatgtaaagcttatacatcacgtgttggtgatggtccattccctactgaattattcgatgaagatggacatcatattagagaagttggtcgtgaatacggtacaacaacaggacgtccacgtcgtgtaggttggtttgactcagttgtattacgtcactctcgtcgtgtaagtggtattacagatttatctattaactcaatcgatgttttaacaggcctagacacagtgaaaatctgtacagcttatgaattagacggtaaagaaattactgagtacccagcaaacttagatcaattaaaacgttgtaaaccaatctttgaagagttaccaggttggacagaagacgtaacaagtgtgcgtactttagaagaattacctgaaaatgcacgtaaatatttagagcgtatttcagaattatgtaatgtacaaatttctatcttctcagttggtccagatagagaacaaacaaacctattaaaagaattgtggtagaactttatataagtcatacgcaatgattataaatacatgagccttctatctttattggtaggaggcttttgctttgtttgcttctgtatcgattcgattatttagataaaaattactaacgtaaaggtgatatttgctagtcataatttaaaagattagatgatatttaacaaaattaagaagaaatacttgaatttaataagtctgatgtcgaaaatagctattaaaatagagtagacgtaagtgtaaatgaaagtacctaaaatagaaaaatttcaaaaatagcgtaattattataataaatagactgccaataaaatgcaatttttcacttataacattcttcaaaaaataatagcaaaattatgtaaaaaatatcttgtcatggcaagattggctgtgctataatctatcttgtgcttaagaacggctccttggtcaagcggttaagacaccgccctttcacggcggtaacacgggttcgagtcccgtaggagtcaccattttttaggtctcgtagtgtagcggttaacacgcctgcctgtcacgcaggagatcgcgggttcgattcccgtcgagaccgtacaaatgcctatccaagaggataggcatttttttgcgtttaatattatattaataaaagatatatggacgaatgataatcatattgatttatctgttcgtccattttctttataatgtatgaacctcaagtaacttagtggttggatatgaaagataaacgtagacaataaaatctttattagacgtacaaacatatgctactgtcaacatatttcttcgttgtgatatgccaccaatcctccataacatcaattgttaaagtaacgaataacgaataatgatatttattttctgagcaatgacgtgcaactagaagttgccattaccctaattttattattggaatagagacctcatcattgtgttaaatatcattatcataatccgccgtgagaaactaataaaaaatattaatatataagtttatattggaaaatagaattaatagcttataaatggtaaattatataataggttactatacgttataagacggaaaatgcgcacaataacaaaaatagtaagcgacatcctgtgattttttacacaaacataaacgataaagaacaaaaaatgataaaataatattaatgatttaagaaaagaggtttatgcaaatggctagaaaagttgttgtagttgatgatgaaaaaccgattgctgatattttagaatttaacttaaaaaaagaaggatacgatgtgtactgtgcatacgatggtaatgatgcagtcgacttaatttatgaagaagaaccagacatcgtattactagatatcatgttacctggtcgtgatggtatggaagtatgtcgtgaagtgcgcaaaaaatacgaaatgccaataataatgcttactgctaaagattcagaaattgataaagtgcttggtttagaactaggtgcagatgactatgtaacgaaaccgtttagtacgcgtgaattaatcgcacgtgtgaaagcgaacttacgtcgtcattactcacaaccagcacaagacactggaaatgtaacgaatgaaatcacaattaaagatattgtgatttatccagacgcatattctattaaaaaacgtggcgaagatattgaattaacacatcgtgaatttgaattgttccattatttatcaaaacatatgggacaagtaatgacacgtgaacatttattacaaacagtatggggctatgattactttggcgatgtacgtacggtcgatgtaacgattcgtcgtttacgtgaaaagattgaagatgatccgtcacatcctgaatatattgtgacgcgtagaggcgttggatatttcctccaacaacatgagtagaggtcgaaacgaatgaagtggctaaaacaactacaatcccttcatactaaacttgtaattgtttatgtattactgattatcattggtatgcaaattatcgggctgtattttacaaataatcttgaaaaagagctgcttgataattttaagaagaatattacgcagtacgctaaacaattagaaattagtattgaaaaagtatatgacgaaaagggctccgtaaatgcacaaaaagatattcaaaatttattaagtgagtatgccaaccgtcaagaaattggagaaattcgttttatagataaagaccaaattattattgcgacgacgaagcagtctaaccgtagtctaatcaatcaaaaagcgaatgatagttctgtccaaaaagcactatcactaggacaatcaaacgatcatttaattttaaaagattatggcggtggtaaggaccgtgtctgggtatataatatcccagttaaagtcgataaaaaggtaattggtaatatttatatcgaatcaaaaattaatgacgtttataaccaattaaataatataaatcaaatattcattgttggtacagctatttcattattaatcacagtcatcctaggattctttatagcgcgaacgattaccaaaccaatcaccgatatgcgtaaccagacggtcgaaatgtccagaggtaactatacgcaacgtgtgaagatttatggtaatgatgaaattggcgaattagctttagcatttaataacttgtctaaacgtgtacaagaagcgcaggctaatactgaaagtgagaaacgtagactggactcagttatcacccatatgagtgatggtattattgcaacagaccgccgtggacgtattcgtatcgtcaatgatatggcactcaagatgcttggtatggcgaaagaagacatcatcggatattacatgttaagtgtattaagtcttgaagatgaatttaaacttgaagaaattcaagagaataatgatagttttttattagatttaaatgaagaagaaggtctaatcgcacgtgttaactttagtacgattgtgcaggaaacaggatttgtaactggttatatcgctgtgttacatgacgttactgaacaacaacaagttgaacgtgagcgtcgtgaatttgttgccaatgtatcacatgagttacgtacacctttaacttctatgaatagttacattgaagcacttgaagaaggtgcatggaaagatgaggaacttgcgccacaatttttatctgttacccgtgaagaaacagaacgaatgattcgactggtcaatgacttgctacagttatctaaaatggataatgagtctgatcaaatcaacaaagaaattatcgactttaacatgttcattaataaaattattaatcgacatgaaatgtctgcgaaagacacaacatttattcgagatattccgaaaaagacgattttcacagaatttgatcctgataaaatgacgcaagtattcgataatgtcattacaaatgcgatgaaatattctagaggcgataaacgtgtcgagttccacgtgaaacaaaatccactttataatcgaatgacgattcgtattaaagataatggcatcggtattcctatcaataaagtcgataagatattcgaccgattctatcgtgtagataaggcacgtacgcgtaaaatgggtggtactggattaggactagccatttcgaaagagattgtggaagcgcacaatggtcgtatttgggcaaacagtgtagaaggtcaaggtacatctatctttatcacacttccatgtgaagtcattgaagacggtgattgggatgaataataaggaacatattaaatctgtcattttagcgctactcgtcttgatgagtgtcgtattgacatatatggtatggaacttttctcctgatattgcaaatgtcgacaatacagatagtaagaagagtgaaacgaaacctttaacgacacctatgacagccaaaatggatacaactattacgccatttcagattattcattcgaaaaatgatcatccagaaggtacgattgcgacggtatctaatgtgaataaactgacgaaacctttgaaaaataaagaagtgaagtccgtggaacatgttcgtcgtgatcataacttgatgattccggatttaagcagtgattttacattattcgattttacgtatgatttaccgttatcaacatatcttggccaagtactgaacatgaatgcgaaagtaccaaatcatttcaatttcaatcgtttagtcatagatcatgatgctgatgataatatcgtgctttatgctataagtaaagaccgccacgattacgtaaaattaacaactacaacgaaaaatgatcattttttagatgcattagcagcagtgaaaaaagatatgcaaccatacacagatatcatcacaaacaaagatacaattgatcgtacgacgcatgtttttgcaccaagtaaacctgaaaagttaaaaacatatcgcatggtatttaacacgattagtgttgagaaaatgaatgctatactatttgacgattcaaccatcgttcgtagttcaaagagtggtgttacaacctacaacaataatacaggtgtcgcaaactataacgataaaaatgaaaaatatcattataaaaacctgtccgaagatgaagcaagttccagcaaaatggaagaaacgattccaggaacctttgattttattaatggtcatggtggtttcttaaacgaagacttcagattgtttagtacgaataatcagtcaggcgagttaacatatcaacgtttccttaacggttatccaacgtttaataaagaaggctctaatcaaattcaagtcacttggggtgaaaaaggcgtctttgattatcgtcgttcgttattgcgcaccgacgttgtgttaaatagtgaggataataaaacgttgccgaaattagagtctgtacgttcaagcttagcgaacaatagtgatattaattttgaaaaagtaacaaacatcgctatcggttacgaaatgcaggataactcagatcataatcacattgaagtgcagattaacagtgaactcgtaccgcgttggtatgtagaatatgatggtgaatggtatgtttataacgatgggaggcttgaataaatgaactggaaactgacaaagacacttttcattttcgtgtttattcttgtcaacatcgtgttagtatcgatttatgttaataaagtcaatcgctcacacattaatgaagttgagagtaacaatgaagttaattttcagcaagaagaaattaaagtaccggctagtatattgaataaatcagttaaaggtataaaattagagcaaattacagggcgatcaaaagactttagttctaaagctaagggcgattcggatttgaccacatcagatggtggaaaattattgaatgcgaacattagtcaatcggtaaaggtcagtgacaataacttaaaagatttgaaagattatgttaacaaacgtgtgttcaaaggttcagaatatcaattaagtgaaattaattctggttctgtaaaatacgaacaaacgtatgataatttcccgattttgaacaatagtaaagcgatgttgaactttaatatagaagataacaaagcggctagttataaacaatcaatgatggatgacattaagcccacagatggtgcagataagaagcatcaagttattggagtgagaaaagcaatcgaggcattatattataatcgttacttgaaaaaaggtgatgaagtcattaatgctagactcggttactactcagtcgtgaacgaaacgaatgttcaattgttacaaccaaactgggaaattaaagtgaagcatgacggtaaggacaaaacgaatacttactatgtcgaagcgacaaataataaccctaaaattattaatcattaatatgaatcgtaataagctagtattgcaagctcatcatatgtgagaagcggtgctagctttttgctggtatgggttttcatggatgacatttctgcgtctctaatgtgcgcatttattcatattttaagtagaaccgcattttaaaattaacgtaactgctattttaaaaactttagtatttgtctaatcattgttataataattaagaaattcattgcacgtgattatcaaaatttaaatataagaaaccggtcgatgaactaaagttacataataggaaaggtatacaaaacagctaatatactgatagtttctgtagggaaaatcgtatatttgcactgatgtatattgcagtcatatagagagattgactgtttaaagagaaaggatgagccgcttgatacgcatgagtgtattagcaagtggtagtacaggtaacgccacttttgtagaaaatgaaaaaggtagtctattagttgatgttggtttgactggcaagaaaatggaagaattgtttagtcaaattgaccgtaatattcaagatttaaatggtattttagtaacccatgaacatattgatcatattaaaggattaggtgttttggcgcgtaaatatcaattgccaatttatgcgaatgaaaagacttggcaggcaattgaaaagaaagatagtcgcatccctatggatcagaaattcatttttaatccttatgaaacaaaatctattgcaggtttcgatgttgaatcgtttaacgtgtcacatgatgcaatagatccgcaattttatattttccataataactataagaagtttacgattttaacggatacgggttacgtgtctgatcgtatgaaaggtatgatacgtggcagcgatgcgtttatttttgagagtaatcatgacgtcgatatgttgagaatgtgtcgttatccatggaagacgaaacaacgtattttaggcgatatgggtcatgtatctaatgaggatgcgggtcatgcgatgacagatgtgattacaggtaacacgaaacgtatttacctatcgcatttatcacaagacaataacatgaaagatttggcgcgtatgagtgttggccaagtattgaacgaacacgatattgatacggaaaaagaagtattgctatgtgatacggataaagctattccaacgccaatatatacaatataaatgagagtcaccctataaagttcggcactgctgtgagacgactttatcgggtgcttttttatgttattggtgggaaatggctgttgttggaattaaggttctatttgaaatgtaaaaaataattcgatattaaatgtaatttataaataatttacataaaatcaatcattttaatataaggattatgataatatattggtgtatgacagttaatggagggaacgaaatgaaagctttattacttaaaacaagtgtatggctcgttttgctttttagtgtgatgggattatggcaagtctcgaacgcggctgagcagtatacaccaatcaaagcacatgtagtaacaacgatagacaaagcaacaacagataagcaacaagtaacgccaacaaaggaagcggctcatcaatttggtgaagaagcggcaaccaacgtatcagcatcagcacagggaacagctgatgaaataaacaataaagtaacatccaacgcattttctaacaaaccatctacagcagtttcaacaaaagtaaacgaaacgcacgatgtagatacacaacaagcctcaacacaaaaaccaactcaatcagcaacattcacattatcaaatgctaaaacagcatcactttcaccacgaatgtttgctgccaatgtaccacaaacaacaacacataaaatattacatacaaatgatatccatggccgactagccgaagaaaaagggcgtgtcatcggtatggctaaattaaaaacaataaaagaacaagaaaagcctgatttaatgttagacgcaggagacgccttccaaggtttaccactttcaaaccagtctaaaggtgaagaaatggctaaagcaatgaatgcagtaggttatgatgctatggcagtgggtaaccatgaatttgactttggatacgatcagttgaaaaagttagagggtatgttagacttcccgatgctaagtactaacgtttacaaagatgggaaacgcgcgtttaagccttcaacaattgtaacgaaaaatggtattcgttatggaattattggcgtaacgacaccagaaacaaagacgaaaacaagacctgagggcattaaaggtgttgaatttagagatccattacaaagtgtgacagcagaaatgatgcgtatttataaagacgtagatacatttgttgttatatcacatttagggattgatccttcaacacaagaaacatggcgtggtgattacttagtgaaacaattaagtcaaaatccacaattgaagaaacgtattacagtcattgatggtcattcacataccgtacttcaaaatggtcaaatttataacaatgatgcattagcacaaacaggtacagcacttgcgaatatcggtaaggttacatttaattaccgcaatggagaggtatcaaatattaaaccgtcattgattaatgttaaagacgttgaaaatgtaacaccgaacaaagcattagctgaacaaattaatcaagctgatcaaacatttagagcacaaacagcagaggttattattccaaataataccattgatttcaaaggagaaagagatgacgttagaacgcgtgaaacaaatttaggaaacgcgattgcagatgctatggaagcgtatggcgttaagaatttctctaaaaagactgactttgccgtgacaaatggtggaggtattcgtgcctctatcgcaaaaggtaaggtgacacgctatgatttaatctcagtattaccatttggaaatacgattgcgcaaattgatgtaaaaggttcagacgtctggacagctttcgaacatagtttaggtgcaccaacaacacaaaaagacggtaagacagtattaacagcgaatggcggtttactacatatctctgattcaattcgtgtttactatgatatgaataaaccgtctggcaaacgaattaacgctattcaaattttaaataaagagacaggtaagtttgaaaatattgatttaaaacgtgtatatcatgtaacgatgaatgacttcacagcatcaggtggcgacggatatagtatgttcggtagccctagagaagaaggtatttcattagatcaagtactagcaagttatttaaaaacagctaacatagctaagtatgatacgacagaaccacaacgtatgttattaggtaaaccagcagtaagtgaacaaccagctaaaggacaacaaggtagcaaaggtagtgagtctggtaaagatgtacaaccaattggtgacgacaaagcgatgaatccagcgaaacaaccagcgacaggtaaagttgtattgttaccaacgcatagaggaactgttagtagcggtacagaaggttctggtcgcacattagaaggagctactgtatcaagcaagagtgggaaccaattggttagaatgtcagtgcctaaaggtagcgcgcatgagaaacagttaccaaaaactggaactaatcaaagctcaagcccagcagcgatgtttgtattagtagcaggtataggtttaatcgcgactgtacgacgtagaaaagctagttaaaatatattgaaaacaatactactgtatttcttaaataagaggtacggtagtgtttttttatggaaaaaagctataaacgttgataaacatgggatataaaaacggggataagtaataagacatcaaggtgtttatccacagaaatggggatagttatccagaattgtgtacaatttaaagagaaatacccacaatgaccacagagttatccacaaatacacaagttatacactaaaaattgggcataaatgtcaggaaaatatcaaaaactgcaaaaaatattggtataataagagggaacagtgtgaacaagttaataacttgtggataactggaaagttgataacaatttggaggaccaaacgacatgaaaatcaccattttagctgtagggaaactaaaagagaaatattggaagcaagccatagcagaatatgaaaaacgtttaggcccatacaccaagatagacatcatagaagttccagacgaaaaagcaccagaaaatatgagcgacaaagaaattgagcaagtaaaagaaaaagaaggccaacgaatactagccaaaattaaaccacaatccacagtcattacattagaaatacaaggaaagatgctatcttccgaaggattggcccaagaattgaaccaacgcatgacccaagggcaaagcgactttgtattcgtcattggcggatcaaacggcctgcacaaggacgtcttacaacgcagtaactacgcactatcattcagcaaaatgacattcccacatcaaatgatgcgggttgtgttaattgagcaagtgtatagagcatttaagattatgcgtggagaagcatatcataaatgatgcggttttttcagccgcttcataaagggattttgaatgtatcagaacatatgaggtttatgtgaattgctgttatgtttttaagaagcttatcataagtaatgaggttcatgatttttgacatagttagcctccgcagtctttcatttcaagtaaataatagcgaaatattctttatactgaatacttatagtgaagcaaagttctagctttgagaaaattctttctgcaactaaatatagtaaattacggtaaaatataaataagtacatattgaagaaaatgagacataatatattttataataggagggaatttcaaatgatagacaactttatgcaggtccttaaattaattaaagagaaacgtaccaataatgtagttaaaaaatctgattgggataaaggtgatctatataaaactttagtccatgataagttacccaagcagttaaaagtgcatataaaagaagataaatattcagttgtagggaaggttgctactgggaactatagtaaagttccttggatttcaatatatgatgagaatataacaaaagaaacaaaggatggatattatttggtatatctttttcatccggaaggagaaggcatatacttatctttgaatcaaggatggtcaaagataagtgatatgtttccgcgggataaaaatgctgcaaaacaaagagcattaactttatcttccgaactcaataaatatattacatcaaatgaatttaatactggaagattttattacgcagaaaataaagattcatcttatgatttaaaaaatgattatccatcaggatattctcatggatcaataagattcaaatattatgatttgaatgaaggattcacagaagaagatatgctagaggatttaaagaaatttttagaactatttaatgaattagcttcaaaagttacaaaaacatcctatgatagcttggtcaatagcatagacgaaatacaggaagacagcgaaattgaagaaattagaacagcacaaaaagataagacactcaaggaagtggaagcacctaaaggaataattccaaaatataaaaaaggtgtatcaaagactactaaaaatgattcagaaattgaaaaatcaaataaagagaataaattaaccggtaaagttggagaaaaattagcgctaaattactttaatgagctaattgataataaaatagacgaagataagaaagaacagtttaggaatattttaaatgataatccaggctctcaacacggtcatggctatgatttagtagcttttgatccaacaaatacagataaagctgtagaaaaatttattgaaattaaaacatctacatcttctagtattgaggaaccattttttatgtcgctaaatgaaatgtttgctatgaaagaatataagcagaaatatttaatattaagaatatttaatgtttccggtaaagaaccacaattttattttatagatccatatgcaaattattctgaatttaaagatgtagatgatctcattgacaaagtatttaatgtagaagctattcagtataaagtttttggcgaaaaatgattacttgaacaagagctaaaataaaattgtgatctaataaaaatagaaactgtaatttaaataaaactttctaaataagctaactgataaaaaatcagtttgtccacagtctgaaacaagattcctatattctttaggaatcttgttttttctatttttatggtgataaagagcagataagataatgtgtaataatcacaaaaaagttaaatattttaaggcttgtttaattattaatgattttatatataaagagcagtataataaagttgttaatatattatgaataatattcaagtaattttattgttttttaatttgtcgatatttaagttgagttaaatttaaagggtgtaatttgttttacaatgatgaagataattagtctatcaaaataaaggggttgggactgttatgagtgataatttgtcattattcattgactatatcaatgataatataatctatggtagtgaaatcaaacgggagaaattagagaatttatttaatcaatttgctataaaaaatgttgaaaagaacattgtctatgatgaactgaaatctttagatattacaatcattgagtcacaggattcatataaaaataaattgaagagattattttcggttctgttgcaaagtaaaaaaatatagctaaccactaatttatcatgtcagtgttcgcttaacttgctagcatgatgctaatttcgtggcatggcgaaaatccgtagatctgaagagacctgcggttctttttatatagagcgtaaatacattcaataccttttaaagtattctttgctgtattgatactttgataccttgtctttcttactttaatatgacggtgatcttgctcaatgaggttattcagatatttcgatgtacaatgacagtcaggtttaagtttaaaagctttaattactttagccattgctaccttcgttgaaggtgcctgatctgtaattaccttttgaggtttaccaaattgtttaatgagacgtttgataaacgcatatgctgaatgattatctcgttgcttacgcaaccaaatatctaatgtatgtccctctgcatcaatggcacgatataaatagctccattttccttttattttgatgtacgtctcatcaatacgccatttgtaataagcttttttatgctttttcttccaaatttgatacaaaattggggcatattcttgaacccaacggtagaccgttgaatgatgaacgtttacaccacgttcccttaatatttcagatatatcacgataactcaatgtatatcttagatagtagccaacggctacagtgataacatccttgttaaattgtttatatctgaaatagttcatacagaagactcctttttgttaaaattatactataaattcaactttgcaacagaaccatctaatcttcaacaaactggcccgtttgttgaactactctttaataaaataatttttccgttcccaattccacattgcaataatagaaaatccatcttcatcggctttttcgtcatcatctgtatgaatcaaatcgccttcttctgtgtcatcaaggtttaattttttatgtatttcttttaacaaaccaccataggagattaaccttttacggtgtaaaccttcctccaaatcagacaaacgttacaaattcttttcttcatcatcggtcataaaatccgtatcctttacaggatattttgcagtttcgtcaattgccgattgtatatccgatttatatttatttttcggtcgaatcatttgaacttttacatttggatcatagtctaatttcattgcctttttccaaaattgaatccattgtttttgattcacgtagttttctgtattcttaaaataagttggttccacacataccaatacatgcatgtgctgattataagaattatctttattatttattgtcacttccgttgcacgcataaaaccaacaagatttttattaatttttttatattgcatcattcggcgaaatccttgagccatatctgacaaactcttatttaattcttcgccatcataaacatttttaactgttaatgtgagaaacaaccaacgaactgttggcttttgtttaataacttcagcaacaaccttttgtgactgaatgccatgtttcattgctctcctccagttgcacattggacaaagcctggatttacaaaaccacactcgatacaactttctttcgcctgtttcacgattttgtttatactctaatatttcagcacaatcttttactctttcagcctttttaaattcaagaatatgcagaagttcaaagtaatcaacattagcgattttcttttctctccatggtctcacttttccactttttgtcttgtccactaaaacccttgatttttcatctgaataaatgctactattaggacacataatattaaaagaaacccccatctatttagttatttgtttagtcacttataactttaacagatggggtttttctgtgcaaccaattttaagggttttcaatactttaaaacacatacataccaacacttcaacgcacctttcagcaactaaaataaaaatgacgttatttctatatgtatcaagataagaaagaacaagttcaaaaccatcaaaaaaagacaccttttcaggtgctttttttattttataaactcattccctgatctcgacttcgttctttttttacctctcggttatgagttagttcaaattcgttctttttaggttctaaatcgtgtttttcttggaattgtgctgttttatcctttaccttgtctacaaaccccttaaaaacgtttttaaaggcttttaagccgtctgtacgttccttaaggaattccttagtgctttcatagattaaactcacatcacgctttaaatcgcttattttagactttaaagacttgttttcttcaagcaactcattataatcatttacattttcattaaatcgctctacaagaccactatatttttctttaacttgcccatgttctttacttaattttttatattctctcgccatatcagtactcatgagatttctaacatgctgttttaacctatcgttatctctcgcagcagtcactaagtttttataatcacgctccgatataacaacatttttggttggtttcttttctgttttcattatttcttttcccaaaccaaacatagacttttcacccgttggcacttcaacacttttcatgtgtcgtttcgctggtacttctaaatctgatttaactttatcgctataagcagtccattcatcttttttaactgctaaatttttttctagaaaatcaatctctttttccaaagtttgttttttaaatttagctgtctcaatatgtttacggtcagagccacgttcaccacgcttcaactcaaaaccctgttttttcatatgctcggggaatttatcttgtagccataacagttcttgacgattaaacacattttttccttgcagttttccatcacgcataggcacaacacctaaatgcatgtgaggggtttgctcatcattatgaactgttgcataagcaatattttgcttgccatatcgttcggaaaataatttataactttcctcaaaaaatcgtttttgttctcctggatccagttgctcaaaaaaatctcggtcagatgttactagcaactcatttacaagaacagcatctttcctcgtttttcttgtacctgttttttgtgattcaataatttctttgacacgttcgttgtaatcaatatttttatcatttttcaaatcataattttcacgtgttcgctcatggtcaatatcatcattcgttctactttttcgctctctttgattatgaaattgcatgccttttagtccagctgatttcactttttgcattctacaaactgcataactcatatgtaaatcgctcctttttaggtggcacaaatgtgaggcattttcgctctttccggcaaccacttccaagtaaagtataacacactatactttatattcataaagtgtgtgctctgcgaggctgtcggcagtgccgaccaaaaccataaaacctttaagacctttcttttttttacgagaaaaaagaaacaaaaaaacctgccctctgccacctcagcaaaggggggttttgctctcgtgctcgtttaaaaatcagcaagggacaggtagtattttttgagaagatcactcaaaaaatctccacctttaaacccttgccaatttttattttgtccgttttgtctagcttaccgaaagccagactcagcaagaataaaatttttattgtctttcggttttctagtgtaacggacaaaaccactcaaaataaaaaagatacaagagaggtctctcgtatcttttattcagcaatcgcgcccgattgctgaacagattaataatagattttagctttttatttgttgaaaaaagctaatcaaattgttgtcgggatcaattactgcaaagtctcgttcatcccaccactgatcttttaatgatgtattggggtgcaaaatgcccaaaggcttaatatgttgatataattcatcaattccctctacttcaatgcggcaactagcagtaccagcaataaacgactccgcacctgtacaaaccggtgaatcattactacgagagcgccagccttcatcacttgcctcccatagatgaatccgaacctcattacacattagaactgcgaatccatcttcatggtgaaccaaagtgaaacctagtttatcgcaataaaaacctatactctttttaatatccccgactggcaatgccgggatagactgtaacattctcacgcataaaatcccctttcattttctaatgtaaatctattaccttattattaattcaattcgctcataattaatcctttttcttattacgcaaaatggcccgatttaagcacaccctttattccgttaatgcgccatgacagccatgataattactaatactaggagaagttaataaatacgtaaccaacatgattaacaattattagaggtcatcgttcaaaatggtatgcgttttgacacatccactatatatccgtgtcgttctgtccactcctgaatcccattccagaaattctctagcgattccagaagtttctcagagtcggaaagttgaccagacattacgaactggcacagatggtcataacctgaaggaagatctgattgcttaactgcttcagttaagaccgaagcgctcgtcgtataacagatgcgatgatgcagaccaatcaacatggcacctgccattgctacctgtacagtcaaggatggtagaaatgttgtcggtccttgcacacgaatattacgccatttgcctgcatattcaaacagctcttctacgataagggcacaaatcgcatcgtggaacgtttgggcttctaccgatttagcagtttgatacactttctctaagtatccacctgaatcataaatcggcaaaatagagaaaaattgaccatgtgtaagaggccaatctgattccacctgagatgcataatctagtagaatctcttcgctatcaaaattcacttccaccttccactcaccggttgtccattcatggctgaactctgcttcctctgttgacatgacacacatcatctcaatatccgaatagggcccatcagtctgacgaccaagagagccataaacaccaatagccttaacatcatccccatatttatccaatattcgttccttaatttcatgaacaatcttcattctttcttctctagtcattattattggtccattcactattctcattcccttttcagataattttagatttgcttttctaaataagaatatttggagagcaccgttcttattcagctattaataactcgtcttcctaagcatccttcaatccttttaataacaattatagcatctaatcggttctgttgcaaagtaaaaaaatatagctaaccactaatttatcatgtcagtgttcgcttaacttgctagcatgatgctaatttcgtggcatggcgaaaatccgtagatctgaagagacctgcggttctttttatatagagcgtaaatacattcaataccttttaaagtattctttgctgtattgatactttgataccttgtctttcttactttaatatgacggtgatcttgctcaatgaggttattcagatatttcgatgtacaatgacagtcaggtttaagtttaaaagctttaattactttagccattgctaccttcgttgaaggtgcctgatctgtaattaccttttgaggtttaccaaattgtttaatgagacgtttgataaacgcatatgctgaatgattatctcgttgcttacgcaaccaaatatctaatgtatgtccctctgcatcaatggcacgatataaatagctccattttccttttattttgatgtacgtctcatcaatacgccatttgtaataagcttttttatgctttttcttccaaatttgatacaaaattggggcatattcttgaacccaacggtagaccgttgaatgatgaacgtttacaccacgttcccttaatatttcagatatatcacgataactcaatgtatatcttagatagtagccaacggctacagtgataacatccttgttaaattgtttatatctgaaatagttcatacagaagactcctttttgttaaaattatactataaattcaactttgcaacagaaccgaaaaactagacttgattacaaaatggagcttgggacataaatgattttttaaaaatgagatgagacgtagattaactccataatcaatacgaatctatcgacttctttatttatgatattcatctctttttaatggaaataaaagtgcgattaatgtgataatacagttacgttaattaaaaaaataaaaatgcaaggagaggtaatatgctaactgtatatggacatagaggattacctagtaaagctccggaaaatacaattgcatcatttaaagctgcttcagaagtagaaggtataaactggttggagttagatgttgcaattacaaaagatgaacaactgattatcattcatgatgattatttagaacggactacaaatatgtccggggaaataactgaattgaattatgatgaaattaaagatgcttctgcaggatcttggtttggtgaaaaattcaaagatgaacatttgccaactttcgatgatgtagtaaaaatagcaaatgaatataatatgaatttaaatgtagaattaaaaggtattactggaccgaatggactagcactttctaaaagtatggttaagcaagtggaagaacaattaacaaacttaaatcagaatcaagaagtgctcatttcaagctttaatgttgtgcttgttaaacttgcagaagaaatcatgccacaatataacagagcagttatattccatacaacttcgtttcgtgaagactggagaacacttttagattactgtaatgctaaaatagtaaacactgaagatgccaaacttactaaagcaaaagtaaaaatggtaaaagaagcgggttatgaattgaacgtatggactgtaaacaaaccagcacgtgcaaaccaacttgctaattggggagttgatggtatctttacagacaatgcagataaaatggtgcatttgtctcaatagaaagttagaggtgagtcttacgtttcagtgacggtagacttacctttaacatgttacatactaaaaaattaatttgaataagaaagagagacatatatgaaatacgatgattttatagtaggagaaacattcaaaacaaaaagccttcatattacagaagaagaaattatccaatttgcaacaacttttgatcctcaatatatgcatatagataaagaaaaagcagaacaaagtagatttaaaggtatcattgcatctggcatgcatacactttcaatatcatttaaattatgggtagaagaaggtaaatacggagaagaagttgtagcaggaacacaaatgaataacgttaaatttattaaacctgtatacccaggtaatacattgtacgttatcgctgaaattacaaataagaaatccataaaaaaagaaaatggactcgttacagtgtcactttcaacatacaatgaaaatgaagaaattgtatttaagggagaagtaacagcacttattaataattcataataaaacagtgaagcaaccatcgttacggattgcttcactgttttgttattcatctatatcgtattttttattaccgttctcatatagctcatcatacactttacctgagattttggcattgtagctagccattcctttatcttgtacatctttaacattaatagccatcatcatgtttggattatctttatcatatgatataaaccacccaatttgtctgccagtttctccttgtttcattttgagttctgcagtaccggatttgccaattaagtttgcataagatctataaatatcttctttatgtgttttatttacgacttgttgcataccatcagttaatagattgatattttctttggaaataatatttttcttccaaactttgtttttcgtgtcttttaataagtgaggtgcgttaatattgccattattttctaatgcgctatagattgaaaggatctgtactgggttaatcagtatttcaccttgtccgtaacctgaatcagctaataatatttcattatctaaatttttgtttgaaatttgagcattataaaatggataatcacttggtatatcttcaccaacacctagttttttcatgcctttttcaaatttcttactgcctaattcgagtgctactctagcaaagaaaatgttatctgatgattctattgcttgttttaagtcgatattaccatttaccacttcatatcttgtaacgttgtaaccaccccaagatttatctttttgccaacctttaccatcgattttataacttgttttatcgtctaatgttttgttatttaacccaatcattgctgttaatattttttgagttgaacctggtgaagttgtaatctggaacttgttgagcagaggttcttttttatcttcggttaatttattatattcttcgttactcatgccatacataaatggatagacgtcatatgaaggtgtgcttacaagtgctaataattcacctgtttgagggtggatagcagtacctgagccataatcatttttcatgttgttataaatactcttttgaactttagcatcaatagttagttgaatatctttgccatcttttttctttttctctattaatgtatgtgcgattgtattgctattatcgtcaacgattgtgacacgatagccatcttcatgttggagctttttatcgtaaagtttttcgagtccctttttaccaataactgcatcatctttatagcctttatattctttttgttttaattcttcagagttaatgggaccaacataacctaatagatgtgaagtcgcttttcctagaggatagttacgactttctgtttcattagttgtaagatgaaatttttttgcgaaatcacttaaatattcatccatttttttaacggttttaagtggaacgaaggtatcatcttgtacccaattttgatccatttgttgtttgatatagtcttcagaaatacttagttctttagcgattgctttataatcttttttagatacattctttggaacgatgcctatctcatatgctgttcctgtattggccaattccacattgtttcggtctaaaattttaccacgttctgattttaaattttcaatatgtatgctttggtctttctgcattcctggaataatgacgctatgatcccaatctaacttccacataccatcttctttaacaaaattaaattgaacgttgcgatcaatgttaccgtagtttgttttaattttatattgagcatctactcgttttttatttttagatactttttttattttacgatcctgaatgtttatatctttaacgcctaaactattatatatttttatcggacgttcagtcatttctacttcaccattatcgcttttagaaatataactgctatctttataaacttgtttgaaatttttatcttcaattgcatcaatagtattattaatttctttatcttttgaagcataaaaatatataccaaacccgacaactacaactattaaaataagtggaacaatttttatctttttcatcaatatcctccttatataagactacatttgtagtatattacaaatgtagtatttatgtcaaaataatgttataatttttgtgatatggaggtgtagaaggtgttatcatcttttttaatgttaagtataatcagttcattgctcacgatatgtgtaatttttttagtgagaatgctctatataaaatatactcaaaatattatgtcacataagatttggttattagtgctcgtctccacgttaattccattaataccattttacaaaatatcgaattttacattttcaaaagatatgatgaatcgaaatgtatctgacacgacttcttcggttagtcatatgttagatggtcaacaatcatctgttacgaaagacttagcaattaatgttaatcagtttgagacctcaaatataacgtatatgattcttttgatatgggtatttggtagtttgttgtgcttattttatatgattaaggcattccgacaaattgatgttattaaaagttcgtcattggaatcgtcatatcttaatgaacgacttaaagtatgtcaaagtaagatgcagttctacaaaaagcatataacaattagttatagttcaaacattgataatccgatggtatttggtttagtgaaatcccaaattgtactaccaactgtcgtagtcgaaaccatgaatgacaaagaaattgaatatattattctacatgaactatcacatgtgaaaagtcatgacttaatattcaaccagctttatgttgtttttaaaatgatattctggtttaatcctgcactatatataagtaaaacaatgatggacaatgactgtgaaaaagtatgtgatagaaacgttttaaaaattttgaatcgccatgaacatatacgttatggtgaatcgatattaaaatgctctattttaaaatctcagcacataaataatgtggcagcacaatatttactaggttttaattcaaatattaaagaacgtgttaagtatattgcactttatgattcaatgcctaaacctaatcgaaacaagcgtattgttgcgtatattgtatgtagtatatcgcttttaatacaagcaccgttactatctgcacatgttcaacaagacaaatatgaaacaaatgtatcatataaaaaattaaatcaactagctccgtatttcaaaggatttgatggaagttttgtgctttataatgaacgggagcaagcttattctatttataatgaaccagaaagtaaacaacgatattcacctaattctacttacaaaatttatttagcgttaatggcattcgaccaaaatttactctcattaaatcatactgaacaacaatgggataaacatcaatatccatttaaagaatggaaccaagatcaaaatttaaattcttcaatgaaatattcagtaaattggtattacgaaaatttaaacaaacatttaagacaagatgaggttaaatcttatttagatctaattgaatatggtaatgaagaaatatcagggaatgaaaattattggaatgaatcttcattaaaaatttctgcaatagaacaggttaatttgttgaaaaatatgaaacaacataacatgcattttgataataaggctattgaaaaagttgaaaatagtatgactttgaaacaaaaagatacttataaatatgtaggtaaaactggaacaggaatcgtgaatcacaaagaagcaaatggatggttcgtaggttatgttgaaacgaaagataatacgtattattttgctacacatttaaaaggcgaagacaatgcgaatggcgaaaaagcacaacaaatttctgagcgtattttaaaagaaatggaattaatataatggataataaaacgtatgaaatatcatctgcagaatgggaagttatgaatatcatttggatgaaaaaatatgcaagtgcgaataatataatagaagaaatacaaatgcaaaaggactggagtccaaaaaccattcgtacacttataacgagattgtataaaaagggatttatagatcgtaaaaaagacaataaaatttttcaatattactctcttgtagaagaaagtgatataaaatataaaacatctaaaaactttatcaataaagtatacaaaggcggtttcaattcacttgtcttaaactttgtagaaaaagaagatctatcacaagatgaaatagaagaattgagaaatatattgaataaaaaataaaattgttgtgtttacaacaatacatagaaaacagaggaaacaatcaagtcgttgaatatttcctctgttttttagttgaaaaaattaaccgaaagcctgaatgcaagtcttgattaaatcaataatgcttgtaataacaccagtgaaatccatatgcataccctctttctatttaagatacattaagtataatatcaaacaaataaaaaatgttaaaaattccctaattggctatttagattgcataaatgtcaaaaatttgaaaaacatacaacgactttgcataaaaaatcgtcatattggaaatacgtaatttattgaaataataaaaaaaataaaagaacgaagatgataacctaagtgaggttttaagttgttctaaggtttaatttaatttatgttaaaatagttggtataaaaatacatgataaactataaactaaattcaaaataacttatggggtaggcaattatggaaaataaaatataaatgataatgaaaaaagagtgctaagggaaatttataaccatcataatatttcgcgtactcaaatatctaaaaatcttgagattaataaggcaacgatttctagtattttgaataagttaaagtataaatctcttgttaatgaggttggtgagggtgatagcacgaagagtggtggtagaaaacctattcttctgaaggttaatcatctttatggttattttatttctttggatttaacttatagttctgttgaagtgatgtacaattattttgatggtaatgtcattaagcatgaatcttatgatttacctgatgaaaaggttagtagtatattaagcataataaaaaaacatattgatattcaggagaaacttgatacttataacggactattaggtgtgtctgtttctatacatggagttgtggataatgagcagcatgtgacatatttaccattccatgaaactgaaggaatttcaattgctaagaaaataaaagaaattactaatgttccagtcgtagttgaaaatgaagcgaatctttcagcgttatatgaacgtaattttaatcataatttatcctacaataatcttattgctttaagtatacataaaggtattggtgctgggcttattattaataatcaattgtatcgtggtgcaaatggggaagcgggtgaaattggaaaaacacttgtctcaaaagttagcgataatgtggagatctttcataagattgaagatattttttcacaagaagctttactgcataatttaagtaatcaactaaatgagaagatgacgcttagcaaattaattcaattttataatgaaaaaaatccagtcgtagttgaagaaatggaacaatttataaataaaattgctgttttaatacataatttaaacacccagtttaatccgaatgcaatttacattaactgtccattgttcaatgaaatgcctgaaatattagaagcaattaagaaccagttcaaacaatattcacgtaacgaaattcaaataaagttaacatctaatgtcaaatttgcaactttgctaggtggtacattagcaattatccaaaaagtactacagattaatgatatttacttagatataaaagcataaaaaactaattcaaatgaataatcaaagttcgtaattgtctttataaaaaaatccctcaatccgaattgaattttcggattgagggatttttatagttctattgcagaagaaaactattttaaaaatgctggtaaatgttgatagccacctctaacgttaacaatattcgtaaatcctttatattctaatattcctaccgctattgaacttctaacacctgattgacaatgtacataaattaggtcatttttatcgaaaggtatatcttcatttaaaagtttaccgtgaggaatatgaattgcttgttttaaatgacctttacgccattcatcatcattacgaacatctaatacattatgttcttcaccagtcatttcagaactatgaatagatgatgtgacgatatttgtttgtggcaaacggtaactttttacattttcaaaaccaattaattgtaaagcatgaatagcttgttgaacggtagatttatcgccaattaattcaatatcttagtcataatctaaataccaaccaatttgatttataaaagttttattaaaaggaatattgatagttccatgcatatgaccaccatggaatgcttctttacttcgaagatcaaaagcagtttgtgtattgcttgaactagggtaaacattatatggttggtacatttgcataccaaattgatttatttttttcatttgtgaaaaatggtgtggtggagctggctgattgagtgttaaagtttcgataaatgaagtttcatctttaacattaaaagcccagttgtttattttctcataacccaaagtagttgtaggtaatgaacctagcgctttaccacaaggactccctgcaccatgacctggccaaatttgaatatagtctggtaatgttgcagcaaattgtatggactgatacatttgttttgctccgatttttgtagaaccttcaacatttacagctttttctaatagatctggtctacctacatcaccaacaaagatgaagtcaccgctaaataatcccattggtatactggaacccccaccttcgtcagtaagtaaaaaactaatactctcagggggatggcctggagtgtgtaagacttctaatttaatctttcctaaatagataatatcttgatgcttaacgaaatgtgtttgtttaggcatatttttataattaaattcatctttaccttcatcagatacgtatatacttgcattcaatttatttgccacatctctaatacctgaagcaaaatcagcatgaatatgtgtttctgcagctttagtaattgtgaatccttctttatctgcaacttttaaatattttgttaaatctcgtatagggtcaataatcattgcttctcctgtacgttgacatccaattaaataagatgcttgtgaaaaattgtcttcataaaattgtttgaaaaacaaaaaaaactcctttttaaaatagattttattgattagataaataagttatgatttgcttgctcagtatgtccaatataagtacctacgccaccataatcgacttcatctcttaattcttcttttgaaattcccataacatccatactcatggtacaagcaattaactttatatcttgatcgattgcttgatcgataagtgagtataaagaatcaacatttttcttgttcattacataacgcatcataatattacctagtccaaacatattcatttttgataatggcatatgtattggatccttaggtaacataaggtcaaacattttggaaatacctttctttttaacgcgagttgattgcgctttttttaatgcgttgaggccccaaaaagtaaagaaaatagttacatctttacctgctgctttagcgccatttgcgatgatcattgctgctactgccttatctaactcaccgctaaataaaacaattgttgtacctgtagcagtgtcattgatttcaaattcttttggcttttctttttgaataattgcattaattacatttgcttcttcagtaagatttacaagggtattccctgtttgtttcgcccaacttttaatatcactattgaaaccaggatctgtaactgttacctcgatttgctcacccgttgaaatattgttaatttctttactgatattaacaataggtccagggcactgaagacctctaaaatcaaattgtttacgattctctttgatttcaatatctttttctattaaaggagcactattgaagttctttgcttcataatctttatatccaccctttaaattcacgacatcataaccttgtttggctaaataatcgcaagctttagtgcttcggttaccgcttttacaatgtatataatacgttttgttgctattcttattgaatgatttaatctcttctactgggtgtaaagttgaaccgttaatgtgtcctaattcatattcttcttttgttctaacatcaatcaattgacccatttttgccaatttttctaattcttctttgtttaatgaattaatgtgtacttctttgtattgttccatacttacctcctataaatacctatgagggtataataaaacggatagaatcatttgccaaatacctatatgggtatttgacaattttgttttaatttattattattaacttaatcaatttatgtggaggaaatgaatatgacttatgataaaaaaatgattaatcgtataaatagaatacaaggtcaattaaatggtgtcgtaaaaatgatggaagaagaaaaagattgcaaagatataattacgcaacttagtgcatctaaaggttctatacaacgtttaatggggattataattagtgaaaatttaatagaatgcgttaaaacagcagaagaaaataatgaaagttctcaagaattaattaatgaagcagttaatttattagttaaaagtaaataatggatatagcaaatatgactattatgttgctaattggcgtactgggtggatttatatctggattaataggtattgggggcgcaattattatttacccagctattcttatattgccaccattaataggtatacctgcgtatagtgcatatattgcttcgggacttacctctagtcaagtatttttcagtacacttagtggatcattaaatgcaagaaaacaaccagctttctctcctaaacttgttatatatatgggagggggtatgttgattggaagcatgttaggggcaattttagctagtttgtttaatgctacttttgtaaatacggtatatgtaataatcgccatacttgctttaatattgatgtttattaaagttaaacctactacacaagagacgaaatctaaacctttgctatttattatagttggatttggaattggtgtaatttcgggaattgtgggtgcaggtggagcatttatcatcattcctgtattattagcattatttaaattaccaatgaatacggtagtgaacaatagcatagcaattgcttttatatcttcagtaggggcattttttataaaattaatgcaaggatatataccagtagaaagtgcaatttttttgataattgaatgatgatcattttctgaaaatattatgtggtcatataatataatgcccatcatttcactaatctcttttattctctgagttattttgatatctcctggagaaggtgttacatcttatcaagagtaaattacaaaagaatcatttaaatcaatactttcactttgaatacatgtatttgaagtggaaggtacttatttcaaaaatagtaaaacctgtatcttaaattacttaatagtaacataagatacaggctgattttttattcattgttatttatactaaagcacccgatagctctgaaaacaatcacaaattcaacttttcaaagccacagctttaagttattttgtccagacaacccccattgcccaacccattttatggaattggcatccaggcaacaacttttcatataaatcgtaataattttgttcagataggtacttatctgaagctaaatgctcaagccatgatttagatgtgttgtgattataaattctaatcgcattttttattccaaatttgaaacaatgcggtaaaaactcttggattgcccctaatttataaacataggtaggcggtgtctcgacttcagatacattatcaagaataactattcttccttcctcattcaacagttccttcatttgctgtattacgctggctatatcatccaaatgatgaaaggttgttcggcttacaataaaatcaaacttctcattaaaattaagttgttctgcattcatattcagatagaccgtatttgttagttgacgtttagatttggcaagatcgagcatttgattagaaatatcaatccctaccacttcatcataataacttgctaatttctccactaacaaacccgagccacatccgatatctaatgctctgcctttctttggagacatattagacacaaagaatgaataatcattcaaaagctcattcacgaaatcgtaatcttctgcaaccttatcaaactgtgattctattgtattcaaaaagatcccccattcctactttatcgacattctttcattacttaccactttagatgttttttcgttggggataaaacttccctttagacaattttatccaaagacaatacaacagtgcaactttattaaagtcactgtcctttatcgcagcctttactttttagtaaagacagtggcttctcttatcaagtttcaaaacatattattttgaagaaaacgtccatctgaagtgtcaagtgcaaaattacatataaaggtttattctaaaatgaaaagatgatacaatcatattcagttacataaggaggtttcaattatgtgcaccagtatcgcagtagtagaaattactttatctcattcataatgaaaaaaatggaaaggagataaaagtatgggtactttttctatatttgttattaataaagttcgttatcaaccaaatcaaaattaattggttataatgaacgcttaatgtcagttcattataaccagtaaggagaaggttataatgaaccagtaaggagaaggttataatgaaccagaaaaaccctaaagacacgcaaaattttattacttctaaaaagcatgtaaaagaaatattgaatcacacgaatatcagtaaacaagacaacgtaatagaaatcggatcaggaaaaggacattttaccaaagagctagtcaaaatgagtcgatcagttactgctatagaaattgatggaggcttatgtcaagtgactaaagaagcggtaaacccctctgagaatataaaagtgattcaaacggatattctaaaattttccttcccaaaacatataaactataagatatatggtaatattccttataacatcagtacggatattgtcaaaagaattacctttgaaagtcaggctaaatatagctatcttatcgttgagaagggatttgcgaaaagattgcaaaatctgcaacgagctttgggtttactattaatggtggagatggatataaaaatgctcaaaaaagtaccaccactatattttcatcctaagccaagtgtagactctgtattgattgttcttgaacgacatcaaccattgatttcaaagaaggactacaaaaagtatcgatcttttgtttataagtgggtaaaccgtgaatatcgtgttcttttcactaaaaaccaattccgacaggctttgaagcatgcaaatgtcactaatattaataaactatcgaaggaacaatttctttctattttcaatagttacaaattgtttcactaaattaaagtaataaagcgttctctaatttcacaagaggacgctttattcttcccaaaaattgttcaatatttatcaataaatcagtagttttaaaagtaagcacctgttattgcaataaaattagcctaattgagagaagtttctatagaatttttcatatacttaacgagtgctttcacctttgaatatagtccttcccacttatcatcacactctccccgatagccttttctagctatatccagtaaagttacatgctctttaggtaaaagaggtatagcccattctgcagcgacatctttcgaggtaatttcaccagtagtcactgtttgccacattcgagctagggttaaaattacattacgctcatcaccttttatcccctcaattagttctggcaaagaatccttaattgctcttcgaatatctgtcaaaggtacggagacaagtatacttgaagaatcaggaccaaatagagaaatactattctttcttgcttgtgctaaaacaatagccaaatcaggatcatagcttggttcctgaatttgtccattctcaaattcacccctgagccactcaccgtatataaattctctttttggaggatattgccaagggacaacttcactcctatttataaccgtaacttcaagtggtctaacagaatccgtatttccaatctttcctgatatagtcattagtctttctgttagtttttttcgagttaattgaggtaaactatgattcacgacgactagaacatctacatcgctgttaatgcgtaaaccaccatttactgctgaaccaaatagatatactccaactattgaacttccaaataaatcttttacgatttttaatgtttgaatcgcttgatttggtatttttccgttaatcaaattgctcatgatttcacctcgttgattatgttcatataaagtttatattgatactcaatttacttaccctagattggacatatacttaaattactgttcaataaagctgaccgttagcgtttaagtacatcctttcacaatttgtctacagattaataattattctttattatacagatctccatataatttttgaatttggttctgtaattttttattttctttttctaattccattactcttctttttaaggttttaataaggatttcctccgaacgagaacttttcttgggttttgagactacatttgctgttatttgacgctcacgaagggattcgattctttgcctaatatcgtgttccttataaagccatgatttagaaacattagcttcctttgctattgaattaaaattaataactttaccttcaatcgaaaatttagaaatcgctttgtctactttttcccttgtcttttttgatttctgcttcgccaaacgtacaatttctgttgtatttctaacttgtttatccattgataattaccccgtcaaacttccaatgatttgttctaaacgctctttaacacggctattagtctctacttgtctttgccattgtttatccttagctatggctaataactcttctgtacgctctaactgttcttcgtgctgtggtaagaattgcttactggtacagaagtgagtgcaatctaagcatgcattcgcatgtggacaaccacctgctactactggcaatctacaataaccatttggaagcacttgtgcatttatatttttcttgaaccattgaagctctacatcatcgacttcattatcttcatctagatcaagcacatctccattattggtaaccagtttttcctgaaatttagtaaattcattttttagagtttcatcaaagatatgagcgtatctgcttgtcatttctgggctttcatgccccaaaaatttctgcacaatatgctggggcatcccgttgttaatcattcttgttcctactgtatggcgaaaggcatgggcatggaatctataaatctcacctgatttatccactatattttgctcataagctaatttatttaactcacctctaaatgtttcttgttttaatggcgatccatcttttcttggaaagaggtattcactatctggaaattcctctgaaactttatcttcccgaactttaataagtaaagctacctctttagatattggaactatatgctcctttttcattttccattgataatactttaaaaagaaatctccatctttgtcctctaatagacagccttttttcaaggtgcacaattcacttatcctcattccacattcttgaacaatcatagtcatcgtagctatatattcgggtaatttatcaagatgactgttcaattgctctaggacgaattcatctataaagcgtggttttgctcttggtattttcggatagtcctcagaataaattaatattttggaaggaacatcatcccattctagcctaagaagggtactaaatagtccttccaatatagagatcctcccagttattgtactaggttttattcccatcatgtttagttcacttaaatatgcttcaatttccactctcgttaattggtgtactctctgaacttgtttaaatttcatgtccagaaaattaaagaactctttaagtctttgggcaatatcacttacataggaaaagctatccacgttcaatctcaacttacaatatctttttacaagttgtttaaaatatgtattccgaaaccctttaaagttaattgtatattcatattgtgttgggttaaccttatcatctggcaaaggtaagttacgtctatcccaaacgtctttatcccactcctctccatcaaaataaaagttctcataaaactccataaattgttttagattagtaacatagtaggaattagcttttacaggtgttttttcttgattagcagtaatcttataattagtagtggtaattctaacaccccgttttgtcaaataagttctatactccgtcattgctttttcaataggaacttcagtaattgaagtaatgctaggatactttaaatctaagaaatctaacattttattaattactgttccttttctaatccagacagtttttgcattccatattccattgtttaaatggtaaaaataaaaatatttcaattctgttcttaaccacagatttttaacacgttcaaaacgaacccaacgattccttaaagcaggattcttacttaattctatggcagaaggatgtggacattttcttatatcccaactattattagcccaaaacccctgcatttcttcattcattacagctatttttttgctaatctcactctgactaataattttccttttactagaagcattcatttcttatgctcctttctctcgaggtatttattaaactcatttttcatatcctgatctgaaagatgaacataggtatttaacgttgtctgaacatgtgcgtgacctaatctcttttgaacgaacgcaacatcccatccttccctaattagctgcgttgcgtgagtgtggcgaagcatatgtgatgtaaattctattccagtccttttaactattcttctaactagatcaagaacactttggtactttagtggtttcccaaaatagccttcttttaaggaaataaaaacataatcatgctccaattcctcactatactcatatatcaagtaatctgtataaagtgacataagttctttactcacatgtattgttctttccttccttaatttaatataagcttcattaacattaacatctctaggtgttaaatggatttgattgtcccaagtgacaatatcttcaagcctaagcgataacacttcaccgattcttaaaccaccctcatacataagcattaaaattaatttatctcttttcgtatgacaagcatcaataatttgcttaacttcctttgatctcaatgttcttatctgtttctttttaacccttaactttaagacattcttttggtatctacccttattaacatgatgtaaaaatcctttgaaatttcttccctttgcttgtttaaatacatcaattgatttaaattctcctaatctacttaaataatcaagaaaactcataactacatttaaaattgtattcactgtcgtttcttctcttatggctttttttgactgaagatcaattacatttgatgctgaaggatatctcaaccaacctacgaagtctgctaacaactcaaagttaatatcattaagaataacacctctctgttccatgaactcgtacagcaactttaaatgatagcagtatgccttaatggtattaggagacttaccagtattatctaagtatttaataaatttcattactggttctattagctggtattctttatctagtaataaatacaatggatacggcttattctccacttctatcctttgaaccttcacatgttcccacctctttaaatactttaactactacaaattataaaccttgttaatttttatttaaagtaaaatatccctttaatatctcctcttaaactactttaactactattatttattatactatggttaatacatctccacttggatgattatgaccgagcattatactatttgcgttactgagtatcgctgttttgaatatttctctagggtgaatcaccgtttggttaatagatccaatcgatagtgtttgaatatgtgtaggttcatttttactgttcatacatatgagaatgagatgctctcggtcactgtttccaatgaatgaacgcatgatttctgccgcatcctcagggtttgaaatacgattttttagataacttaatgtatctgtttttatcatttgtagtgaaacaatattgatttccttcatcgtttacctccatatataggttatgctttcaaagtccatttttgacgtgctttagggttgagtgggtgcatgatttcatttgtggctggattaatgagctttttgactttctttttatgaggcttcaacatttccattacttgttcgacacgttctacaacaactggccgcttcgcataagcaccataagctagaatcactgtgtcactttcgctaattgctttcatcaagtggatgtctgtgtgtttatcataaggttctttaatatgtttaaggttctctggtgttttaatattagagaatagatttacaagatatacagcaccgtatcgttctgaattcgctaattgattgaggataagaacagttgtgagatcgagtgataatacaccatctaaatgagggtacatcgttatcactgtacaagcgggtttcttttcatcccatgttttcttgagtaaatagcggtgtttttcatccttgctaaatatagcttctgtgtatatcgtatttttgattgtattcatatatataatcacttcctttagtattcttctggtaaaagcatcacataataaaaagcgtctacgccatcttcacgaatgacgtagactttcttaggtaatgcattttgattttttacatagtttgtatagtgatattccaatttgtatgcaggttgttcttgttcatgtgtgattgagagtatattctcatcttcttgcagtttaaaaatgtgtaggtaatctgtatgaggttgattatctctttcttttaccatattccaaagtaagatttgaaggtctagagataggtattcactaatacctcttgtgatgtatcgattgattttcatgttattttacctcgtcttgaatttctttcataatgataatcgcttggctaataatcgtaacagatatttgtgccactttgatccagttattcatggtgagtccctccttctcttagtaaatgacgttcatcgataatcgtatttttagtatctgtgagatataaaaagtccatgtcaaaatgattcagataaccaacgctgatgagttggttattagcgtacataagaaatggatagatacttaggtcatgtagttcattattgtagtaggtataagtttcaagtgtaagatgtgcaagtggggaatcattaataaaacgttccggtagaatattttctgctgcttcttctaacgcttcgcattcccatgtttcattgttagatagttggaatagacgagttatatattgtttgagttcttgagtggtcgttttcatatcattgcctcctagatagtgttatagtgatgtagtttatgtacatcattgggataatatatatttgatttgtcatttattacgcatcccggtgagaatgagagaaaattccatatgaaaaaccgcttcaaaccttggtatgacaaggaaatcccgaaattccgcctattttgacgaacaatcaactcattctttataactattgatgttagggtggggctctgctttcttatatattatttatttataaagaataacgggattttgggattgtgcttgcacaatccttctgcttcttcgaatctgcaaatcccaatcatttcccgataaaaaatcattgtgggatgttctttagcaatttcaatataagcatcgtgtagttatgaaaaaaattacgacaatgactgtttcattagataagtgttattgaaattgataaagagaattttaaaaatggttagataaaataaatgaaagaatataatgaaaattattgttataacaatgattctattagctaaatagtaagatatagtgtttggggcaaaaacaaagacgaagtgctgagatgcacttcgtcgagttgtttattattgaaaagttgttttatgatttcgttattaagtttgagtgtgacatagaattgttttttatgattaccatcttttttaatatcaatgcgatcaatcactgatagatacaatgctttgagtcgagatttttctatgtgcttaatatcatgaaagatgtgttgtaatagtttactgatttctttggcatcaaataaaggcttatcttcattttgttgatttttgagttggttgatttgattcgtaatgtcattgagttgcttttcatatttttgaatacttggtctgattactgatgttaagtccggattatcctcgatggttttaatcaagttatttagtttgatttgtacttcatcatattgttgttgcttataagcaatatcgtgatgaagtgcagcgccatcaacttgattttcttgattgacgtgtgttactacgcgttgaatgactttatcacttttgactatttcaagtatttgcttcatcacataatcttcaatcacatcagctcttacactgtttgccgaacatactttggaacccttgttccgaaaattactacatgaatagtaacgaatacgtttcttagtcccgtctttaagtgtattcgtggtattgcttgctgccataggtgcgccacattggggacagtgaataatgcctgtaagcagattcgttcctttgccatggacttggggtttttgactgacttgttttttacgcatttgtactttatcccataaatcttgattaataatgggggaatgcttaccttcagctatcactggtttatcattaagccctttacgacgtttttcactccaatctttgtatttcgcaaattgaattttgccgatatagaatgggttagctaatatatatgtgatagaactaatactaaaaggtttaccctttttagtgacatagcctttgtgatttaatgcattggctattttacgatagccatggcctttggcataggactcgaatatatatttcacaatattagcttcatgttgattaatcatcagttcatgtttactattaggtattttgtcatagcccagcggcaaattgccttgataatagccttcttgggcacgtctcgtttgacccataaatacattctcgacaatgttattacgttcgaattctgagaaactcgcaagtatttgtaacatgagcttacccgatgaagtattgacttccatacgctctgataaactgaaaaattcgacattttgtttgtgtaaatcttcgacaattttgagaagatcagatgtattacgagctaatcggtttgttttgtagaccataacacagtcgatatagccttctttcgcatccttcaatatacgttggagctcaggtcgattcatagatttacctgaaataccacggtcagcgtatatatctttaacttcaaaatgatggaagtcacagtattctttgatttgattgatttgtccgtcgatactataaccttctgtgctttgcatttctgttgatacacgtacatagataccgacacgttttgttttaagttgttgcattatgtttcatcctttcttcgtttatgcaatcgatgattgcatggtttgattgacgatattgagtggttcatttttgaaatagattcctataagatttttatctttcgtaatgtgaatggtttcaatataggggtacaatatgtttaacgtgaaacgtttttgaataatattttgaatggtgtgttgtatttgatgtccattgatagatgtagtgcgttgcggttgttgacgtaatgattgcgtttgttctctgaacgtttctgcatcgatgatgccttgtgccaacttttctatcagttgttcttgagtcaatgtgtgatgtttttctatgtttctttgtcttttgatgcgtttgtcaatcgcacctttaatttttgtgtagatgcgttgattttgataaaagtctttgcacacttctaatactttatcttcaagtgtttgtgcattgatgcctttaaaatcacagacaaagcgagaagcattcatgtttttaggacagacgtagtaacgtaatgtatgattcttttttctaacggtcatattcgtaagtgttgtattacaacatgggcatttgattttttgttttagttggttatccgaagatgtctgtttgatttgtttttgcgatcgaagtctctgcgcttgctcatatatacttgtggaaacaatagaaggaaacatattgtcgaattggccatattgattgttgacacgaccacaataattaggattgatgataatgttacgaacttgatagggttgtcgattgatatacgtgttatcttcttctaataactgtgcaattttcttataaccatgacctttaatgtaataattgaatacagcctttaccgttggtgactcattttgattgatgatgaatgctccgttgtgatattcgtaaccaaagggcgcatgggttgtaatcaatcgaccttgctttgctttttcttgaagcccatttctgacttgttctccaatgttatctgattcaagttcggccaagctgataaaaatattaagcttgaatcggtcgaaagcttgatccatatcaaagtaaccatcgtgtacgcttaagatatgaacatggtatgtttgacataatttgatgagttttaatgcatttttcagattacgatgtaatctattaagacgataacaacataatatgtcacattgcccttgttgaattaattgcgtcatttgtcgatacccactacgattatctttgcgtcctgattgtttgtcgctataaaagttgatatgttgaatatgatgtttttcggctattgcttcgatagcctgtttctgtgctgcaagagattgttgtttcatcgtactttgacgtaaatagcctatgacttgtttcatatcggctcctcctttcacagtaataatatatatttatggatgaattgatatataagcccaacatcaataagatgttgggcgttcatattagtcattcatttgattgatttcttcaattaccaaatcggctaatatctcgataagttcatccatgtttttcactccgttatttgttctatcttcaatacgtcgattattcagtttgatgcttcacggttgtatgataaagacaatcagaaatcttcgtgaactcctgaagggcctatcccctcattagcggatttaaaaagttctttcgcagctttgttatcatttgccggtgtccaattttgaattaacgacttatctttagttaatcccaggatagatgcaaactctacatctaattttagatggtaaaatacaagtgattgttttttaccgctattatctttgacacttcttttagttgtttggcgtccacggtcagctaatatgaaacctttatctcttaaggcgttgacaacattattaacatcttgaaattgatgattgtttagcatctgtttaaaaacgtttgcaatcatttttacttcgatatggtcatcttttaatgagattaatccatagttctcaaacatatttttcaaagcaccttcatctgaaaacttacctctgttttgtgctacaaattgaatgatgacatcgatagctttatcagctaatgagcgttcagagattgtatgaccatgataatcaataaagtagtctcttattttagcgatatcaatatctgtagctaaaacacgacctaatatttttgcagatgttgtaatgactgcataacgcttaaacatacgattgcctgtgttgcttttatcatctttcaatttagcttcaaaccaatctacttccttgtaaaaccattgaataacttcatcttcacgatttataagatatttagctactaacggtaaaacatgaccatagtttagtgctacagcttttttaatattgtcagcattggtcgcatttgtagtgaattgttcattaatctcgatggttcttacacgtaatccatcgttttgagctgaatcattaaaaatactgtgttctgacgttgaaatgacagaagtaccccaattcttaggcgttttaacttctccatgaacgtttgaacgttgacgaccttgaccttcagtgatggagtacaataaccccgttgtatctctaaaagttgctgatgagagttcatcaaatacaataggtataccaaaattgttactcaagtaaccttcaagtgcattacgtgtggcattccaatttctaaagagagtttcattacctttggtagggttaccagcgactgatacagctaaagaagctgcagttgacttaccggttgaggattgacctgtaaaactaaaaatgattccggcaaattcggtttcatgtttgtgcttcaggaaactcgtcactaaggcagaaataccaaatacgactgctaattctaaaagaagagaacctttaacctcttttagatacatgttaaaccaattatcaaatgttcccctaggtgctaagtcataagtattctcacaaatggcgtcagatggagatttattatcaaattccgtagtagtatagatttcatttaacgatacaataggaccaaacggtgtttccagtatacctaccccttcatataagtaggaaatgggtaattggttgcgcatttgttgcaacgcataacctaaatcttttgtatatttttcattaatactaaatccatatttcattaaagagggcagtttttgtgttgttaaaatatcactagattcaacaattactttttgatcctcgtctgtaataattactttttcagtgttagttttagggtcaataaacttattttcgataacgataggacctgcgatttcaacttcagtaggcattcctcctttttctttgggaggcttgtctttataccaacctttttttgatttgtatcgtggtgaaggattaaatgaagggttagtttgagtcattagcgaacacctcctttcgaagggttgctgttatagtgtggattaggacctgttttaagataaactaagtgaccgtgagtatccttaccgataataataaatggaacacgtggcgcatgttttacaaaatatgcgaaccaacgtccaacattttgttgtacagcttttgaacattgtacatttgcacgactgttcaagtcatgaaatgtaaattcttctccttcaggtaaattgaatgaaatacctaatattttcttttttaactgctcgaatttatctgattgattgaaatacatttaacttcctcctactaatgaactaagataggaaaattaaatatgcgcacaattaactttcttaagttcattttagccaagaagttatcatttgaaagcttgtaaaaatatgttagaaattccgtactaaattaagatggatttttgttgacaaaataaaaaacgctgatttaacagcgctttaaataaaaattaatctgaagttatataaaagtagtcagaaggagtggtgttattatcattataataatctagtgctttattgatttcttttattaatttatcatgatgttcttttgttattttctttggatatttgagttctttttcttctaagtcttttggagacactaggtcactatttaaaattaatgataacagcatatttttaggtgccgaagctctggtgtctcgatgagtaatatattttgctaaattactgtttatacttactttttcattttctaaaaagtttgtactatttttaacatgagcatcagcaattttggtacttatttcagtgtttaaatcgtctatttcatctaaataatattcaagaatctgaagtttatctttagaagtgatacctttttcagtgaaaatcttaataatgatagatttgattccaatttctatattactgtctactagaaaatagagataataattagtcagagcatgttcataatctctttgatcagtaatttcatgattgatgaaataatataagttctctttgatacgattagaagaatctatatctttgtcattgataccgtttttaaaaaagtgtagataaactgagttgtttgagagtatatcatataatacaaataaactttttggtttaaatacatatgattttcctgatttaaagtttgctatgtttattcctagagcgttgcagaatttattaaaattagttgtaaaattatttttttcttgaataaacatgtcgttgtcatttaattctgaactatgatttttaatcatattgatattttcttcaatcttgtcactacttaaattttccatgcaaagtatactatatcttactatatcacttatatttatggaaaaatctttaggagaacgatttaaagtatcctttttattatcttgatctacagccctacatgaatcatcaaaaacttctttgacatttattttatcaatgttcaaaattatgtctactaaagcattttgaaaatcatcgctatatatgtctttattattcatagtgtcactacctttatttttaataacactatatattatatcttataaacctaataccatgaagaataaaaagaatgattcaaattttatatttaatccatagttggctgctatggttagtgtactagtctagttttactagtatataaaacagtactcaatttttattttttcaaaattataaaaaagaacacctatcatcgataggcactgaacccctaaaacgggaacttaataaaaacaccatgttctaggctattaattctctgtattttacaggggataagtagcctagtttttgttgaatttgattattattatagtttttaatgtacttttcgacaatatctattacaatatgattagagctattaagctgattattgatgtaaagagtttcagactttagcgaggaatggaaactttctatcggggcgttatcggcaggtgttccctttcgggacatacttctgataatgcctttttcttcgcataattgataataagcataagatgtataaacgctgccttgatcactatgtaatatatacccctcaggtatatcgatttgatttaatgtatcattaactaaacgttggtcttgtttatcatctattttatacgccacaatttctccgttataaatatccattatcgaagataaatacaacatagaatgatcaaatggtaaataagtaatatcggttgttaatacttctatgggacaattcgctttaaattatctttgtaataaattgtctgttttataatacggtttacctatccttgtcgtctttttaggtctaactcggcagttcaaatgatgcttctgcatcattctctgtactctcttatgattaattggtgatgtataacattgattaatcagtgctgtaatcttacgataaccgtaggtataatggttagcttcacataattcaataactttttgtgttacagtatcatttttataggttttgtttttccatcggtaatatgttgatttaggtatatttaatacttctagtatcaatttgattgaatagtttccttttaattgatccactaaatctatgactactgttggtaccacttcctttccaatgccttgtacttttttaaaatatccaattctatatcttttctcttattttctaattttaattgttctacttctgacagctcttctaatcctttaccgtaggtatattgtttaccaacgtgttgtgaaaatctataactttccccatttcgataccatcgccaccaagtttccacttgtgttctatttttaatatttaattctttcataatttcttttgttgaaaatcctgctgctttcatttcaactgctttatactttgtttctactgaataagaaactcttttcatagaaaaaacacctccgtatgattcattttaatatgaattcaacgaaagtgtttttatataattcccactaattggggtcagtctactatatgatacggttttttaatttaaagtatcaataataattggatatagagggaaagaagctataatgatatttgcttactaagtggataaagatattagaaaaacgagaagcaggacagttattaaatcggtagatattaatcataagtatttaactgaatttttaccttttgtcgaatatataactaaagttgaaggtagtaaaatatttatctagtcgatattaaaacaatttatcgaaaacgatggttttccatatcctctttagtagcaattttctaacaatatataattaattatatacaaattaagaataattaagaagtatatattaattagagatagtttaaaaattagatttcaatcaattaattaaaacaggttagactattaatttatactaacctgttaaaagtaacaaaattaagaatatattaaaacttgtgtaatgagtaagcctccaccaaatattaaaacaaacgcgacaacaggccatacgaaacgtaaccagtgtgagtagcgcacgtttaacatttgaagtgttgccattacaagtccagtaggcgctaagaacaacattgcatactgaccgaattgatatgttgtaacaataacaaatcttggtatacctactgtatcagctaatggcgcaaagataggcatagataatactgctaatcctgatgatgatggtacgataaatcctaaacagaaaaagataaagagcagaacaatgataaataaaggcccactcatatgttgcacgatagatgatgaaaagtgcaagattgtgtcagaaatcattcctttattcaatactaagttgattccacgagctaaaccaatgattaaagatacacctactaaacttgaagcgccattaacgaatgcatctacagtgcctttttcgcctaaaccatattgtcctgttccagcaataaacatgatgacaatggtaaagattaagaatgcagatgccatgactgggaaccaccatccttgtgtcataacaccccaaaccataatagggaatggtaggacgaaaagcgtaagaataatctttttacgtaatgtaaactcagaagaaccgtcatcatggagcacagaccactgtttttcaaatgctgctttgtcttcataagaataagaggatttaggatcttttttaatttttttacaataccagaataaataactaataacaaatatggcaccgatgatacaagcgcctattctccaataaagaccatcagtaaaagttgttcctgctgcattagaagcaatgacgactgagaatgggttgattgttgagaatgtactacccacagagcttgctaagaaaattgcaccgaaagtaagactttagaatctatgggaaagataataaggtttaatagaaatacaagaagtgtaaatagtaagcatataatttatacattttaatataatataacaagaaaggtaaacacaaagataataaaaataaaaatttaataaagatagagaattattaaattgtttttgatataaaacaacttaataaaaaatttaattttaggggaggataattataatataaagaaacatagaatggaattgcaattgggaagtatacgattttaactgcgaatcatatgttcaacgacttacaaatgcgtaaatcgataacacattcaaaaatatataatctgaaaattgatttactaagagaggattattgtagttacaggtgttaagttgctccaatatggagttgtcgtcttgttttatattaaacaagttttattcaaatacatgacaatacgtaaaataacactagaattatcaatcactaaaattaaaacaaatgtatctattcaaacttttctttagggtttacttgctgaataatttaaaaatgaagtattaggtgtacatgctttcagaattgcttttgaagaatattaaaagtataatctgaatacgatgacagaatgaataggtaaactatgacaagaagtcatcaaggttatcaaataaatatatcccagcggttgagacgactcactgctgggattttattgttagttatttattctaagtgttgcatttggtagccgattctaggatgtgtgatgattaatttcttttcagtgtttgggtcttgcgtataattcaactttttacgtaaagaggccatatgtacacgtaaggcagccatttctgtatgattgacatagccatagagtgattttaataacacttgataggttaatactttgccgacatgatggcataatatcgttaggagttggaattcattcggtgttagatgtacggactgttcattgacaaggactgatttcgcatcgaaatcaatggttaatggaccatttgtgaaacgactttgaattgtctcagtagaacgtgacatacgtaatgctactctgatacgtgctcttaactcatcgatattgaaaggcttagtcatataatcattggcaccgcgatctaatacttcgacaatggtttgttcctctgttcgtgcactaatcacaataataggtgtgtccacaaagtctctgaattgctgaatgagagataaaccatcaatatctggtaagcctaaatctaataagataatatctggttgttctgttcttaggcgaaagtccgcttctttccccgtcttcgccgtaaccactttataataattcatagttagcgcaacatcgattaaatgtaaaatcgcttcatcatcttcaacgaccaataatgttgttttcatccatggctccctccatttcaattggattaacagtcaaataaaaataaaaaatactgccttgtggtgtattcggttgatattctaattcactgttgtgttgtttcaagatgagttgtactaaatagagccctaatcccaaactatcttttttattgtctttaaagttgtctcctgaataatagggattaaaaatcaattgacgttcttcttctggaataccttttccgcaatctatcatttcgaattttattttgtttgtttcatgttgaacgtgcagttttatttcagaatgtgattctgcatgctttaaagcattatcgataaggttgaatagcacttgcagtattaatttactgtcgatattaatgagtgaagcgtcatcctcattttcaataatgacatgatttgcttggtgtctgcgtatgaggccttcttcaaattcttctagaagttcttctactaaataaggggtgcgttgtatttgaatgtcagagctttctaacttagtcaaagataaaatatttgtgactaaggtatgcagatattgtgcttcgccataagaagcagttaagagttctgcttgttgttgatcgtttaaatgctcgttatggtatttcagcatatctaagttgcccataatggaagtcagtggtgttctaatatcatgtgaaattgaatgcaagaagtttgaacgtgtggcttctcgttcagctttcaatatggattgtctggtttgttttaatagatccacattctctattgccagggtaatatcgttcaacatagagtctaatattgaattgtcataggtgtcgatgtaagtttcgtcggtgaagcggatagaaatcacacctttgactggatttgtgccaatgggaatacacaaaaatttactgccaggaaaggtatcggttaatttaccggcacggctttcattttcaatgacccagctcaatgtctcagcatcatgtgtcttatctgagcttgaaatgcttctgtttccaaatgagttggaagcagcgactttcttactttgaattaagaataccgtgacatcctgattgagtagctgatgaatctgatcaccagcaatatttaataagcgttcaattgaataagattctttaatggactggttaaattgcagcataatattggtccgatataactgccgttctgttaaggaatgctgatgttttaaattctttaagatggcactcgtaaagatactagcaaaaatactggtcgcaaacgtaatcggatattcaaagcgatacatttctaaagtgaatcttggcaccgtaaagaaataattaaaaacaaacacatttaagatagacgcaaagaatccgattaaataggattgggtccaaatagaaagcacgataataccgataaagaacatcagcaagataatggcactggattcgcttttatctaagttgtaaacccatataccgagcaagacacagatcgtttgaattacaagcatcttcataatctctacagttaaacgagaggatttttgagcttgcttaggtgtatttgtaggtttgtctgaatgaatataatgaatcggtacaatttctaacttgaaatggtgtggtacgtgattaatttgttcaatgagtgactgtttaaagtaatctttccaacgtggctgttctgactgtccaaggactagcttcgtcacaaaagcgagatcacaccaatcggttaacgctttcgcaatatcttgtgcatacaacactttgatttctgcacctaacgctttggcgagcattagatttttatggacataatgatcttgttttctgctttctgacggtgtctcaaagacatcaatatacacagctgtgaatttagcatgttctttataggcagcacgtcttgcttctcgtatgacccgttcgttataaatactgccgctgatagctaccgcaatatgcggtgtaatgtcggtatgtttagttttatattgttgtcctttttgactcataatatctgcgacagttctgagtgtaagttcacgcagctctgtcagattttcatacgtaaagaaattagaaaaggctgtttctaagcgttcttttttatatacttttcctgctttaaggcgctgaatcaacatatttggtgaaatatccacaacttcaaaggcatctgctgacgtaatgaattggtcgggcacacgttctgtaacttgaatacctgtcattaacgcaatttgtccgcttagactctcgatatgttggatgttgagtgttgtccagacatcgataccatgcgatagaatttcttctatatccttataacgttttaaatggcgctcttttgaaatgtttgtatgtgctagttcatcaattaagaccacatctggattagcttctatgattttagagacatctatatagtgaaaggtgtggctgccaaatttacggctggaggtcgaaatttcaggcaattgttgaaccagtgcattggtttcagggcgttgatggggttcgatataaccaattttaatatctgcaccttcttgatactgatcaataccatttgataacatttcatacgttttacctacccctgggctatagcctaaataaatggtaagtttccctctttttttatatgtactttccatgaggcaccccctcttaatcacatcataattaatatacaacatattatccatttatctttctgttttgttaatcatctttatagtttctttataactttccttaaatgttaatacttcgattagataactcttgttaagattttgatgaaagtaaggagggagcgcaatgattacactattagctgtcgttgtcatcgcattaattttatttttattttacgcattaatttggagtgaaaaattttaacagagaaagagggaagcatcatgagtattgtgttgtttttgattgtatttatcttgctctcactcattgtgagccgatatttatattcagttgctttaaatgtgccatctaaaatagatgttgtttttaatccgattgagaaattgatttatcaactgattggcacgaaattagaacacatgtctgggaagacgtatatcaaacattttttgttgtttaacggattgatgggcggattgtcctttgtattattgcttattcaacaatggctgtttttgaatcctaaccataatttaaatcaatctgtatcgttagcctttaatactatggcatcttttttgaccaatactaacttacagcattatgcaggtgaaacagatttaagttatttaacacaaatgtgtgtcatcactttcttaatgttcacgtcagcagcgtcaggttacgccgtatgtattgcgatgttaagacgtttgactggaatgacagatgtgattggtaatttctatcaagatattacgcgttttattgtacgggtgctcatacctttcgcattgatcatcagtttgtttttaatcagtcagggcacaccgcaaacgcttaaaggtaatttggtgattgagacattatcaggtgtgaaacaaacgattgcatatggaccgatggcgtctttagaatctattaaacatttagggacaaatggtggtggtttcttaggtgcgaactcttctacaccttttgaaaatccgacatactggtctaattacgctgaagctttaagtatgatgttgattccaggttcattagtctttctattcggtagaatgttgaaaactaaactacagattcatccgcatgcgattatgattttcgttgcgatgtttgtaatgttcatcggctttttagtgacatgtctctattttgaatttgcggggaatccagtgttgcatcacttaggtattgccggtggcaatatggaaggcaaagaaacacgtttcggtattggcttatccgctttatttacaaccattacgaccgcttttactacaggaacagttaacaatatgcacgatagtcttacaccgctaggcggcatggttccaatggtattaatgatgttgaatgcagtttttggcggtgaaggtgttgggctgatgaacatgttgatttatgtcgtgttaacggtctttatctgtagtttgatgattgggaaaacaccaagttatttaggaatgaagattgaaggtaaagagatgaaactcattgcgctttctttcttagtacatcctttacttattttggttttttcagcactagcttttattgtgccaggggcatcagatgcgttaactaatccgcaattccacggtgtatcacaagtgttgtatgagtttacatcatcttcagcgaataatggctctggttttgaaggattaggagacaatacggtattttggaacatttcaacaggcattgtgatgttgcttgcacgatatattccaatcgttttacaaattttgattgtatctagtttggtaaataaaaagacctatcagcaacatactcaagatgtaccgattaataatttatttttcagcagtgtattgattatctttattattttgttgagcggcttaacgttcttacctgacttaatgcttggaccaataggcgaacagcttttgctgcacgcatagataaaggaggattagaaaatggctgaaactactaaaatatttgaatcacatttggtcaaacaggctctaaaagacagtgtattgaagctctatcctgtttatatgattaaaaatccgattatgtttgttgtagaagtgggcatgctgcttgccttaggattaaccatttatccggatttatttcaccaagaaagtgtatcacggctatatgtgttcagtatctttatcatattattactgacacttgtctttgcgaacttctctgaagcattagctgaaggtcgcggtaaagcacaagccaacgctttacgccaaacacaaactgaaatgaaggcacgtcgtattaaacaagacggcagttatgaaatgattgacgctagtgacctgaaaaaaggacatatcgtacgtgtcgcgacaggtgaacaaatcccaaatgacggtaaagttattaagggcctcgcaacagtggatgaatctgcgattacaggtgaatctgcacctgtaatcaaagaaagcggtggagatttcgataatgtaattggaggaacttctgtagcttcagactggttagaagttgagattacttcagaaccaggtcattcatttttagataaaatgattggtttggttgaaggggctacaagaaagaaaacacctaatgaaattgcgttatttactttattgatgacattaacgattatcttcttggtcgttattttaacgatgtatccattggcgaaattcctgaatttcaatttatccattgcgatgctgattgctttggctgtgtgtttaattccaacaaccattgggggattattatcggctatagggattgcagggatggatcgtgtgacacagtttaatatcttggctaaaagcggacgttctgtagagacttgtggtgatgtgaatgtcttgattttagataaaacaggtaccattacctacggcaaccgtatggcagatgcgtttattccggtgaaatcatcaagctttgaacgtttagttaaagcggcctatgaaagttctatcgcagatgacacaccagagggacgtagtattgtgaaattagcttataaacaacatatcgacttaccgcaagaggtcggagaatatattccgtttactgctgaaacacgtatgagcggtgtgaaatttacgacacgtgaagtatataaaggtgcaccgaatagtatggttaagcgtgtgaaagaagcagggggacatattccagttgatttagacgctcttgtcaaaggggtgtctaaaaaaggtggcacaccgctggttgtgcttgaagataatgagattttaggtgttatttatttgaaagatgtcattaaagatggactcgtagaacgtttccgtgaattacgtgagatggggattgaaacggtgatgtgtacaggagataacgaattgacagctgcgacaatagcgaaagaagcgggtgtggatcgctttgtggcagagtgtaaacctgaagataaaatcaatgtgattagagaagaacaagcgaaaggtcatattgttgcgatgacgggtgacggtacgaatgacgcgccagctttagcagaagctaatgtaggtttggcaatgaactcaggaaccatgagtgccaaagaagcggcgaatttaattgatttagattctaatccaaccaaactgatggaagtcgttctaattgggaaacaattattaatgacacgtggctcactcactacatttagtattgcgaatgacattgcgaaatactttgcgattttaccagccatgtttatggcggctatgcctgcgatgaatcatttgaatattatgcatctgcattcacctgaatcagcagtattatctgcgttaatctttaatgcgttgattattgtattattgattccgattgcgatgaaaggcgtgaaatttaaaggtgcctcaacgcaaaccatattgatgaaaaatatgttagtttacggcttaggcggtatgatcgtgccatttatcggcattaagctcattgatctcatcatccaactctttgtctaaaaggaggacaaaacaatgcagacaataagaaaaagtttagactagtactgattatgtttgttttatgcggatttatcttcccgctgactgtcacagcgcttggacaagtattatttccagaacaagcaaacggcagtttagtgaaacaagatggcaaagtaattggttcaaagctcattggacaacaatggacagaacctaaatatttccatggacgtatcagtgcagtcaattacaatatgaatgcgaatgaagtgaaagaaagtggcggacctgcttcaggcggctcaaactacggcaattcaaatcctgaattgaaaaaaagagttcaagagactattaaacaagaaggaaaaaaaatttcaagtgatgcggtgaccgcttctggctctggtttagacccagatattacggtttgacaaatgcgaaacaacaagtaaaacgcattgcgaaagaaagaaacatagatgcttcaaaaattaatcaccttattgatgaaaacaaacaagcatcaccaatggcagatgattatgttaatgtcttaaaattgaatatcactttagataaactctaaataaacagggagtgaggtgagacatccatgtggttcattagcattattattttaatagcattcctaattatattaatgattgacgatttaattaaaacatgacaacttcacgcaaaacaatatgaattggatgtaatagagaagggagtaccaagaaatactcagtttattgaggataattattaggggagattagagaagaattctctattcacgaaattactttaacagttgtaatcattggtttcatcatatcgattaatagtacagtcatcttgagattttcaacacactattatagctagctaagatacttttaaattatgacttatttttcatcatttacgatacatcattctcgataacttactatttgttatggtatttatagatttaaagaaagtgaaggagattaagcaatgtaacttggcttaatctctttttgattatatttattaaggcaaagcttcatttcccttaaatcaagtatatcttctgaataagcaaatgaaatcgtgacgccaactacagtgataacttcgcctaaaacacaatgagtgtggtgttttcacttttcataaactcctctaagtttgtgtttttaaactgtgatggatttgaatgtttttgaattacgttgtcgcgtccttgggattgcaatccaagaacgtcagcataatctaaatcaattttgatttggtagaagacaagagaagtacttttgcctgtatcatctttcgcatttctttttgttgtctttcgatcccgatcggaaactaattttcctgcattatccaaagcatcaataacatttttcgtgtcttcgaattgactgtctgttaacatcttatcgaatacatttcggataatttttacttcgatgtagtcatctttaagtgagaggataccaaagttttgaatcatattagcaagacgtgtttgttgtgaaaacttgcccaggttttccgcaataaactgtacgattgtatccatcgctttatctgcaagagaacgttctgacaccgtttcattatgatagcttaataaatagttctttatgctgctaacgtttaactgtaggtctagtgattgatttaaaatatgggctgttgttgttagagttgcataatgtttaatcattcgaataccagtgttactggattcagttgatagtaattgataaaaaacactgtcttctttttgaaaaagggaagtaacatcattagtgttgtctaataggaattgagcaattataggtaaaacatgaccattattttgactaaccactttttttatagtatctgagttttgagcacttgatgtgaatttttcagacacctcaatagtacgaacacgcaaaccatcatttttagctggatttttgaaaatactatgttcagaagttgaaatcactgatgtatcctagtttttaggtgttttgacatcaccatttatatttgctctttgacgtccttgtccctctgcaaatgaatatagaagacctgttgtatcatgaaatgttgccgctgataattcatctaatactatgggtacaccataatttccgctaagatatccttctagtgcatttcttgttgcattccaactccggaataggttttcagtaccttttgttgggttgccagctaccgatgcggctaacatagcggctgtcgattttcctgttgatgattggccagtgaaagagaaaatagttcctgaaaactcgacgttattatgatacttaaggaaagcagtgactaatgaagatacgccaaacaacacatctagttctaaagataagttcccatggacttcttctttatacatttgtaaccattctgataaattgccttttggtattaaatcgtacttgttatcacatataatagaagtgctattagtaatctcattagaaaaataaggctggtctaatgaaattaatggtccaagtaatgtatgaagcattcctacacctgagtatattgttgataaaggtgtggtgcttctcatttgttgcagtacgaaccctaaatctctaatgtgcttttcattaatggtaaatccatattcaattaaggagggtaattgcaaagcagtaaggattgaagccttttcgacaagctctatattattcaaatccgaaagaaatactttttctttacgagtcgcggggtctataaaacgatctgtgaaagcaatcggtccagataacattatttcaaactccgtacccccatcttttttaggagggatggttttgtaccatcccgaaggtttgagcttgaattcgtcagtttgatatagaattttttccattaacagtgacccccttggttgtaagaggaaattataatgatatgtcggtacttaagtgggttagttcctataataatgaaagggatgcttggtttgtactttatccaccaagcaaagcgtcttcctgcttcacgttgatcgttgatgttgcactgttctctgaataactgtaattataaggtttagtaatggcaattttttatttaaacaaatttttacgaatggattgtctgtttattaattcagcaacgtttattgaagaaaaataagtgtcttctgataattgcaaagggtttaattcaatgtaaactgaattaagggtagggtaggtatgcctgctttttggttcttttaagttcaatcgattaataaaattgttgaacctttgttctaagtcatacaaaaacatcagtaattcattaggagaatgatttattatgcaatccatattttcgtttatgcttgaagttatacatctaaaaacagtattggtttcttcgtataaaaataacttattaatagaggtaacattgattaagactgagtatacgtataataagagtgactctgacatctcatttagataaataagactgtgatcattcttatttacgattattatatgtgattgaatcaattcaataatgtctagaagaagacttgaaaagtcgctgttaatcttggtctttgaaaaatcatcgtgaccatttgtcttattacttagatgtagttgttcgtattttatagtttggcggttgaggaattaagcatttgattattataaactatctcaaaaattaaattacctccttttttcttcctcgatgaaggtttatctaatcttccaatatacaggtttttgaagtaaattatagatatgataatcattaattcagtaaatgtatacttattaaggggtggagctttagctaacttatcgatagtactgccgatgcgtgctttgaaactattcaaattgtcgtgactgtctatatctaaatcttcaaatttactagcaagggtttgcaaagtagaaattacaacttcttcttttgtataatatttattgaaaatatcatcttctttatcatcgctttggagttttaaagtgcctggttctaagatgtcaaattttttgtttcgattggtatttttttaaaatgtgccttgtatttttggggttgttccaaatgtgtatttgctagactacctgtaattgatattgctttatttagcatttggtgtgtattaactgtatctgattcttctggaaatttaaatctaaaagtaaaatctctactaccgaatgtactttttacggctacagttttgtacttatgctcaggcaatgtaattaaaccatcttgatgcaggaggaaaagtgtgtcatcatttaatttctcaattgtattaaataagtaattatgcatagcctctttatacatggcgaattgataatttagattatcccattctattagttgatttaaaatacaatatagaccttcattcaatcggtttacgaatatcaatacagcttcttctcgtccaacaaggcttattaactccttcaagtcatcctttaattttaatttttctccttcaaaattgtattgagtgaagcctatagccttttgaaaagtaacttccatgacagagttggtttcagaatattctaacgattcatttattgcaaaaatcaaattttttataaatatggaattactcatggtttgtaattgcatatactacccaactttcttatttactttaaaacaaatataagctaaagtagttattatcataaagggaacgtacgttcttatttagctgatttctatgaagagaggttatggatattgaatgaagaaatcttacgcgaagtagcagatatttttataggtgatgacagagatagcatttatgattataaaactgggaacgaattagtgaggttttttaatcattactttaataaaggggacatatatcaggctccgtttccatctagatggctatatgttgtgaaacatttgcaaactctgattcaggagagaaagatcaatcaatttttcacattaattttaagcaatcactatattaagtatgaactgaaaattgacgaggttgaagcagcaaagcaggctgctaaagcacttaagttgttcaacaaaagattaaatcattatgggtactacataacaggaactaacaatgctagatattttatggataaggatgaagatacggagtctattggttatggagggtatgcgaatatttatttacagaagtctacaggtcttgctgtaaaaaaattgaaagaggagtatcttactgattcttcaattaaaagtaggtttaagagagaatttgatctcactaaatcttttgatacaaatccattgttcattaatgtgtttgaatttaatgaatcagattattcatacacgatggagttagctgatgaaactttgaaagattacattgaaagcaagacaattagtgagctagaaaaagtaaagataataatgaaaattttaaaagcgatgagtcaagcacatagtgaaaataaaatacacagagatatcagttctaaaaatgtattaatgtttagaggaaaagtcaaaatatcagacttaggattaggtaaaaaccttgatgaaattcattcgcatcaaacctttgatacaaacggtgtaggacaatataaatactgtgcaccggaacagatgtatagtttaaaacaagcagataaacaatctgatgtttttagtttaggaagattgataaattttattatgactggaaatgtagttaacaaccatcacctatttagaggtgtatctgataaggctacgaacagtagtaaagaatacagatttgaagatgcaaatgaaatgttgaaaatgctgcagagaattttagagtatcacagtagtgcaaagcacgtcgaaaaatgtcaagaaaagctgaaaagaggagtgtttgatgatgaaagcgaagaatttattatgacacgaagtgatgaacaattatgtcaaatggttctaagttctaataataatgagcaagcgtgtttaattcgttatatgcaaaaaaacgaatcttcagcatgtgatttaatagagagtattaatagaaagtatcaagagttttgtggaaggtttgaagactacgatccttttgctaaattagcatatatgattttatgtaataacttcagttatagagtgaatgaaacagcagctagagtgctaaattatgttgcttggtctgtaaatagattttcggcacaagacttaattaaaggtttaattaatagaggagtggagcctttgattgaagaaaaattaaaggacaattaaaaaaacctcatcattaactgatacgcagaggcgtatcataagtaaaactaaaaaattctgtatgaggagataataatttggagggtgttaaatggtggacattaaatccacgttcattcaatatataagatatatcacgataattgcgcatataacttaagtagtagctaacagttgaaattaggccctatcaaattggtttatatctaaaatgattaatatagaatgcttctttttgtccttattaaattataaaagtaactttgcaatagaaacagttatttcataatcaacagtcattgacgtagctaagtaatgataaataatcataaataaaattacagatattgacaaaaaatagtaaatataccaatgaagtttcaaaagaacaattccaagaaattgagaatgtaaataataaggtcaaagaattttattaagatttgaaagagtatcaatcaagaaagatgtagttttttaataaactatttggaaaataattatcataatttaaaaactgacaatttgcgagactcataaaatgtaataatggaaatagatgtaaaatataattaaggggtgtaatatgaagattaatatttataaatctatttataattttcaggaaacaaatacaaattttttagagaatctagaatctttaaatgatgacaattatgaactgcttaatgataaagaacttgttagtgattcaaatgaattaaaattaattagtaaagtttatatacgtaaaaaagacaaaaaactattagattggcaattattaataaagaatgtatacctagatactgaagaagatgacaatttattttcagaatccggtcatcattttgatgcaatattatttctcaaagaagatactacattacaaaataatgtatatattataccttttggacaagcatatcatgatataaataatttgattgattatgacttcggaattgattttgcagaaagagcaatcaaaaatgaagacatagttaataaaaatgttaatttttttcaacaaaacaggcttaaagagattgttaattatagaaggaatagtgtagattacgttagaccttcagaatcttatatatcagtccaaggacatccacagaatcctcaaatttttggaaaaacgatgacttgtggtacaagtatttcattgcgtgtaccgaatagaaagcagcaattcatagataaaattagtgtgataatcaaagaaataaacgctattattaatcttcctcaaaaaattagtgaatttcctagaatagtaactttaaaagacttgaataaaatagaagtattagatactttattgctaaaaaaactatcgaattcttcaactacagaaaatatatctatagatatatcaagatttttagaactaagtaatatgatactcttgttagatgatatgctcgacgtcaatatatatataaattcttttaaaaataatacattagagacatttgatgcgactgatcctgaagttgattacatcactgaaataggagattacttattaaaatatgacgttaattctataaatgatgtcagaattgaagtgatagataatttggggcattcaaataatatgctactaaaaacgatactacatgcagaagttgaaatggaagatggaaagaaatatttattacaaaatgggaaatggggttattttaatagagaattttttgaccttttgaatgatcatttgaatgagatagaaattaggtataacacactaactcccacaggtttagtatttaaagaaggagaagaaggatatataaaagaaatagtaggaagattgccagaagaatatttaatgttacataaaaaattcataaaaccaataaataagaattttatagtaaaaggaaatggaatagagttggcagacttatacaatattaaaaacaaagagcttttcacgattaaaagaggaattaatacatctttatctctttatagtctagaacagaatataatagcaattaacgccttaaaatatccagaatcatataattttgaagaattaatagaagctattcctgataactcggaaaatatatttaatgatatacaacggagtacaaattttagtatagtatggattttaccgatatcatctattgataatatgcccataaaagatatggttcatactagtaacgtaataaataaaaactttcaattaactaatttaggttcagtattacttaaaaataaattagtagagtggtctctctatttaaaagatcaaagaattaatccaattatttatatggaaacgccaactgaagatagaaattaaacttttattttaaatcaccctagttcatacctaaaagactttcacacaaacaaacaaaggaggaaacttaaattcctcctttcccttattactcatactataattcaattttaacgtcttcgtccatttgggcttcaaattcatctagtaatgctcgtgcttctgcaattgattgtgtgttcatcaattgatgtcgaagttcgctagcgctcttatgccacgcacatagattttaaagaatctacgcaaactcttgaattgtcgtatttcatctttttcatatttgttaaacaatgataaatgcaatctcaacagatctaatagttccttgcttgtgtgttcgcgtggttctttttcaaaagcgaatggattatggaaaatgccgctaccaatcatgacgccatcaatgccatatttttctgcaagttcaagtcctgtttttctatcgggaatatgggagtgggacagaaatgatattttcccaaaatttatttcgtcgtcccactccaacttgcacattattgtaagctgactttccgccagctactatgttggggcccctgactagaattgaaaaaacttgttacaagtgcattttcgttcagtcaactactgccaatataactttgtagagcatagaacattgatttatgtcccaacctgcaatttcgtcacgtaaatttttaatagcttcgattaattcccactgtgcatctactttactaatgtgtttgataaaaacttaaataattttaattcagtcatcagtggcattaaatcttctatcatttttagttatagttgataaatttatatttataagcatatatatggatatttcatcaagaatttttaatcatataaatccgaactgcatacatatttgttgaaataagaggtattatttttcgggaaattgctgtctgagttataagtattagttttataaaatgagttgaactatagcaaaaacgattaaaatactgataatccatttttgtattatgttagggacttttttacttaattttaaccctattggagcaaatataatactccctattataaggaataaggcgtcatataaagggatataaccttgaataagtttgatgacaaaagcaccaattgaagatataaaagcaattactatactattagcgactacagtattcattggtaatttgaataaaaccaataatataggaataataatgaaggcaccacctgcacctactatacctgaaataataccaatgaaaaggccaatgataactaataaatatttattaaatgaagacttttcggaactaggtttcactttaataaacattaatgttaatgcaagtaaagcaataatgatatataccgtatttacaaatgtagcatcaaataaatttgctagaaatgcacctaacatactccctataatcatgccgccacccatataaagaactaattgtggtgagaactctgttttttttcgagcttttaatgagccacttaatgtactgaaaaagacttggctagaagtaagacctgatgcgatatatgcgctatatgcaggggctccgaataatggtggtaataataaaatagctggataaataatgatagcaccacctacgcctactagaccagatatgaacccaccgaataccccaatgagtaacatgataactatattaacaatatccattacttacttttcaccaataagtttacagcttcattaattaactcttgggagctttcttcatcatccgcagctacttttacacattctattaaattctcactaataatgatacccatcaagcgttggagtgaactctttgatgcacttatttgtgtaatgacatctttacagtcttttccttcctccatcattttaataattccatttagttgcccttgtattctattaatacgattaatcatttttttatcataattcatagtcatacctccacttttaattgaataaaaatatattaatagataaacacaaatgtgtcaaatacccctagaggtatttgacaagttccattcaaccgtttagaatacccctacaggtatttttagggaggttattatgaaacaatacggagaaaagtttatcgatgaatttagtaaagcagaattggaaaaactagccaagcaagggcaattaattgatgttagaacagaagaggagtatgcattaggacatatcaatggttccatacttcatcctgttgatgagattgagtcattcaataaagaaaaaaataaaacctattatgtaatctgtagaagtggtaacagaagtgctaatgctagtaaatatttagctaaacaaggttataacgttataaatcttgatggtggttataaagcttatgaagaaaacgatagttatgatacacaagaagaatataaaagtatagaaattaaagcagatcgtaaacaatttaactatcgtggttttcaatgtccagggccaattgtaaaaattagtcaagaaatgaagaatattgaagtaggtgaccaaattgaagtcaaagtcacagaccctggattccctagtgatattaaaagttgggtgaaacaaacaaggcatactttagttaagcttgatgaaaataacaatggaattaatgcgattattcaaaaagaaaaagcaaaagatttagatataaattattctgctaaaggtactacaattgtattatttagtggagaattagacaaagctgtagcagcattgattattgcaaatggcgctagagctgctggaaaagatgtaactatcttctttactttttgggggcttaatgcattaaaaaaagtgcaaacagttaatgttaaaaagcaaggtattgcaaaaatgtttgatttaatgttgccccaaaagaatatacgaatgcctctttccaaaatgaatatgtttggtttaggaaatatgatgatgcgctacgtaatgaaaaagaaaaatgttgattcattaccaacacttatcaatcaagctattgagcaaaatatcaaattaatcgcttgtacgatgagtatggatgtcatgggtattcagaaagaagaacttagagatgaagttgagtacggtggtgtaggcacttatattggtgctactgaaaatgcgaatcataatttatttatctaattaaatctattaataaaaggagttgttatcatgttttttaaacagttttacgataatcatttatctcaagcatcatatttagtgggttgtcaacgtacaggagaggcaataataatagaccctgttcgtgatttatcgaaatatatagaagttgcagattctgaaggtttaacaattacacaagctacagaaacacatattcatgctgattttgcttcaggaattcgtgatgtggctaaacgcttaaatgcaaatatatatgtgtctggcgaaggtgaagatgcattagggtataaaaatatgccatcaaaaacacaatttgttaaacatggagatatcattcaagtaggcaatgttaaattagaagttctgcatactccaggacacacgcctgaaagtattagctttttactcactgatttaggtggtggttcaagtgttccgatgggattatttagtggtgactttatttttgttggtgatataggtagacctgatttattagaaaaatctgttcaaataaagggttctacagaaattagcgcgaaacaaatgtatgagtccgttcaaaatattaaaaatttaccagactatgttcaaatctggccgggtcatggtgctggaagcccttgtggtaaagcattaggtgccatacctatatctacaataggttatgagaaaattaataactgggcatttaatgaaattgatgagactaaatttattgaatcattaacatcaaatcaaccagcaccaccgcatcattttgcacaaatgaaacaagttaatcagtttggtatgaatttatatcaatcatatgatgtttatcctagtttagataataagagagtagcatttgatcttcgtagcaaagaggcctttcacggtggccacacaaaaggaacaatcaatataccatacaacaaaaactttattaatcaaattggttggtacttagattttgaaaaagatatagatttaattggagataaatctactgttgagaaagcgaaacacactttacaattaattgggtttgataaggtagcaggctatcgtttgccaaaatcaggcatttcaacccagtccgttcatagcgctgatatgacaggtaaagaagaacatgtattagacgtacgtaatgatgaagagtggaataatggacacttagatcaagcagttaatattccacatggtaaattattaaatgaaaatattccttttaataaagaggataaaatatatgtacattgtcagtcaggtgttagaagttcaattgcagtgggtatattggaaagcaaaggttttgaaaatgtggtgaatattagagaaggctatcaagattttccagaatcattaaaataatttaaggatgtggaaaaaatgaataagcattatcaaattgttattattggtggcggtacagcaggtgttaccgtagcatcaagactattaagaaaaaatcaaaacttaaaagagaaaatagcaattatagacccagcagaccatcattactatcaaccattatggacgttggttggtgcaggggtatctagtttgaaaagttctcgtaaagatatggaaagtgttatacctgaaggtgctaactggataaaacaggctgtttcaagttttcaacctgaaaataatagcgttattttaggagataatacagtcgtttattatgattttttagtagtagctccaggattacagattaattggtcttcaattaaaggactaaaagaaaatataggtaaaaatggtgtttgctctaactattcacctgactatgttaacgaaacttggaaccaaatttctaattttaaacaaggaaatgccatttttacgcatccaaacactcctataaagtgtggaggtgcgcctatgaaaattatgtatttagctgaagattattttaggaaacataaaatccgttctaacgctaatgtgatatatgcaacgccaaaagatgctttatttgacgtaggaaaatataataaagaattagaaaggattgttgaagaaagaaatataacagtcaattataattataaccttgttgaaatcgacggtgacaaaaaagtggctacattcgaacatatcaaagcatacgatagaaaaacaataagttatgatatgttacatgtaacaccacctatgggtcccttagatgtagtaaaagaaagtacactttcagatagtgagggttgggtagatgttaacccaaccacattacagcataaaagctactctaatgtatttgcacttggtgatgcttcaaatgtacctacttcaaaaacaggcgcagctattcgtaagcaagcacctatcgtcgctaataatttattgcaagtgatgaataatcaaatgttaacgcatcattatgatggttatacttcatgccctattgttactggatataataggttaatacttgcagagtttgattataataaaaatactaaagaaacaatgccgtttaatcaggccaaagaacgtagaagtatgtatatatttaagaaagatttattacctaaaatgtattggtacggcatgctaaaaggattaatataataaagtacagaaaacaataaatttttaatgaaaaatcttttactataaaagattaagtatttaaatgacgtgtcagtgttgtgtttatatgtcgtgaatttttagctctaaatagtataagattgaaaaagttgttactgttttaaatgatcacgatgaagtcattcaataagaatgattatgaaaatagaaacagcagtaagatattttctaattgaaaatcatctcactgctgttttttaaaggtttatacctcatcctctaaattatttaaaaataattaatggtatttgagcacgtttagcgactttatgactgacattaccaatttccatttcttgccagatattcaaaccacgtgtactcaaaatgatagcttggtatgtacctccaatagtaatttcaataactttgtctgttgaacactaagagcaattttaatttcataatgtgttgtaaacattttttttgattggagtttttttctgagttaaacgatatcctgatgtatttttaattttgcaccatttccaaaaggataagtgacataagtaaaaaggcatcatcgggagttatcctatcaggaaaaccaagataatacctaagtagaaagtgttcaatccgtgttaaattgggaaatatcatccataaactttattactcatactataattctattttaacgtcttcgtccatttgggcttcaaattcatctagaagtgctcgtgcttctgcaattgattgtgtgttcatcaattgatggcgaagttcgctagcgcctcttatgccacgcacatagattttaaagaatctacgcaagctcttgaattgtcgtatttcatctttttcatatttgttaaacaatgataaatgcaatctcaatagatctaatagttccttgcttgtgtgttcgcgtggttctttttcaaaagcgaatggattatggaaaatgcctctaccaatcatgacaccatcgatgccatatttttctgccagttcaagtcctgtttttctatcgggaatatcaccgttaattgttaacaatgtatttggtgcaatttcgtcacgtaaatttttaatagcttcgattaattcccaatgtgcatctactttactcatttctttacgtgtacgaagatgaatagataaattggcaatatcttgttcgaagacgtgcttcaaccaatctttccattcatcgatttcatagtagccaaggcgtgttttaacacttaccggaagcccacctgctttagttgcttgaataatttcggcagcgacatccggtcttaagattaagccggaacccttaccctttttagcaacatttgctacaggacatcccatatttaagtcaatgcctttaaagcccattttagctagttgaatactcgtttcacggaactgttctggcttatctccccatatatgagcgaccatcgggtgttcatcttcgctaaaagttaagcgtccgcgcacactatgtatgccttcagggtggcaaaagctttcagtatttgtaaattcagtgaaaaacacatccggtctagctgcttcacttacaacgtgtcgaaagacgatatctgtaacgtcttccattggcgccaaaataaaaaatggacgtggtaattcactccaaaaattttctttcataatatatttataccctctttataattagtatctcgattttttatgcatgatgatattaccacaaaagcctaacttatacaaaaggaatttcaatagttgcaaccatttgaaagggaagtctaagagtagtctaaaataaatgttgtggtaagttgatcaatacaaagatcaaggattatagtattaaattgttcattattaatgatacactacttatgaatatgattcagaattttctttggctacttttacagtaaagcgattttttagttatcttataacaaagacaaatttataaaggtgatattatggaagatttaaaggaatctttaaaaagtttaggttggtgggatttattttttgcgatacctatgtttctgctattcgcataccttccaaactataattttataacgatatttcttaacattgttatcattattttcttttccataggtttgattttaactacgcatataattatagataaaattaagagcaacacgaaatgaatcattaatacgaatgtgattaaacataaaactgaaggagcgattacaatggcgactaagaaagatgtacatgatttatttttaaatcatgtgaattcaaacgcggttaagacaagaaagatgatgggagaatatattatttattatgatagtgtggttataggtggtttgtatgataatagattattggttaaggcgactaaaagtgtacgtcatcaattgcaagataatacattagtttcgccatatccaggtgccaaagaaatgatattaattccagacattaccgaagcaataaatctcactaatttatttgagctcataaaaaatgatttgaaaaactaatcataaattgccatactcaactattttgaaaagtatcaatttcatattatcaaattattgagtatctcgatttattgttatacacaaacagtatttttgctatgatagagttaataaatataataaattgaataagtaactttacaaaactagaatgattcaattcaatcacaattatttgaaaatagaggtgagcaggtgaacgatatgttaattagtctcgtaatcccagtttttgctttgttagttattggtggtattatttgggtgattatagaaggtatagtacatatttcaaaaaagaataaagcaatcgataactttttaaaccaagttaataaagtaagtgagacatataaattcgctactgcttttttatttctaatcttggctacggctggtatttctcaattttatctatattatatagtatcagcgtttcttttttggcttgtcatacttacctttggtattgcaggtatcatttttttaatgccatatggattatgtttcctaccactttataagcaaaaaaagaaaaaacagacatttaaaaaatacatggtttacactacgattggtttgtcaatttgtctaggcttatctctagttttggttcacactacgaaaatttatatggacgaaggtggcgtaagatactattacggtagttttgtaatgaaacaagcgggcggttatgcttatttagctttagcggtactttcaacgttgttaattgttgcgaaaaaagctacaaataaaaataaagaaatcgaaaccgtcgacaatacaaatataacggaaagataattaagggagtgctcattcaggagtgctcttttttgatgtccaaatttagttgcaaatgaaggcatagaagaaatttttatagtcatttattggataataaattatggtcatatcgattaattttattagtgaggattttacaaacatttgttgaataaatatggtaatgataatatatgaatatttttgaaaaaacactaatatgattaaattatttgttaaaatagcattaagtaaaaaacaaatagggaacaaggtgggatttcatgagtcaattgctaaatgatacgttatcggcttggttgttaattgaatctttaagtccaggagaagtaaattttacagcggaagatatactctcagctgaacattttaaaaatggtgcaaagcaagcacaacttcaaagttttgatgaatattttgaaatatggaattctgaacgctttattatatcagaagaaaaatcagagactggggaacttatatttaaattttatagacattgcttccgctataatgaaattaatttgaaaattcaggatatttttgatgattattctgatattcataatccaaatgggacacactgttatggttacacatttaacacagataaacacggcaaagtgatagttgattctatacatattccgatgattatgagtgcattaaaagaaattgaaaagaacaaaaatgccaatatagaagaaaaatttaatgattctgttgaaaaattttttcaaaaagtaaaagaaattttagcagatgaaccaattaatgaatttaaattgaagaagatggacaaagcttatgatgagtacttttctgtattaaattcaaagaaagatggattatttggacattatgtagcaatagaatatgtgaaagatagtgatttaccacagccggaatttaacagtttcttcataagtgatattgagaaagcaagaaaatctcccaaccaaactttaattgattacattgaaggtgtagaagaaagtcagcgcatagaagtagatgaaaataaagaaatgtttgacaaatttttacatccttcacgtttgcctgatggacgatggccatcacagactgagtttagattgtctttaatgcaacaacttgctgtaaaccaaattacgagtggtaatgaaagaataagttcagttaatgggccaccagggacaggtaagactactttattaaaagatatatttgctcatctagtagttgaaagaggtaaagagttagctaaactaaataatcctaaagatgcatttgtcaaaacaaaaattcatgaaacggatgataaatacgtatacttactaaaggaatctattgccaaatataagatggtagtcgcatctagtaataatggagctgttgaaaatatatctaaagatttaccgaaaattgaagaaattataagaaatcccgaaaaatgtaaattccctaaatatgaacagaattatgcaaatttagcacatgaattaaaagattttgctgaaatagctgaagatttgattggtgaaagtgcctggggcttattttctggagtttttggtaaaagtactaatattaaccaagtattgagtcatatgttaaaacaagatgcgaatgatattggctttgctaaattactacaaaatgagaataatcgtatgagttataacgagttaatgagtgaatggcaatcacatcaacgtgcatttttagaagagttgaggcatgttgaaatgttaaaagaagaatctattagagcatatgatgtttataaaaattgtgagtctttctctaagattgaacaggttattaatagtgaaaaaacaagtattgaagaacaggtatatcatttagataatgaaacgttacgagacaataaagaaatagaagatttggataatcgaattaattatattgttaagcaaatagaaactttaaatgagttaattaaatccatcaaagaaagcaacaaaggttttattaacaaactgaaagcgatgtttaattcagaagaagatgaaagctataaagatcataataaagagaagcaacaattattaacacaacagttagagttagagaaatgtaaaaaaaacaaacatgaagaccttgttagcaaactaaaagaaaaagagaaattaattaaacaattaactaaagtacagttgcaattagacgagttaaattcacagttacaagagttagaagcatatcgtattgagtcaaaaattacaattccagaaaaagatttttggagtgacaacaattatgatgagcgccaagttactaatctgtggacgagtgacgaacttcaatacagacgtgccatgctctttttaagagcaatgatattgcataaattattattgattgctaataatacaactatttattatgcgattaatgattttaaagatagaaggaaattaattgatgcaaatccagataaagtacacaacgcatggaatgtgatgcatttaatatttccagtagttagtacgacgtttgcaagctttaaatctatgtatgggggcataccaaaagatttcatagactacttatttattgatgaagcaggacaagcaatacctcaagcagctgtgggagcattatatcgttcaaaaaaagttgtagctgtaggtgatccgattcaaatagaaccggttgtgactttagaaagtcatttaattgataacattcgtaaaaattatcatgttccggaatatctagtttctaaagaagcttctgtgcagtctgttgcagacaacgccaatcaatatggtttttggaaatctgatgctactgatagtaatcaaaaaacctggataggcatacctttatgggtgcacagacgatgtttaaaacctatgttcacgatagctaaccaaatcgcttataataataaaatggtgttgccaagtaatattacaaaagtaggtaaaacaggttggtatgacgttaaaggaaacgcagttcaaaaacaatttgtgaaagagcatggtgaaaaagtagtgggattattagctgatgattggattgaagcaattaaggaaggtaaaaatgaaccgagctcatttgtaatatcgcctttttcagcagtacagcaacagattaaacgtatgttaaagcaacaactaccgactagaattgatattgaacgtacaaaaattaatcaatgggtcgataaatccattggtactgttcatacttttcaaggtaaagaggctcagaaggtgtattttgtaataggtactgataatacccaagatggtgctgtgaactggtcatgcgaaaaaccaaacttgttaaacgttgcagtgacaagagctaagaaagagttttatgtaattggcgacatgcaaagaatacagatgaaaccattttatgagacgatttttaaagaaagaaatgtaaaataacatacaaaaaagtatatagaggaagttatacattttaaaaggagcaaaattgaataatggagaaatttaacaactggatattaaatgcaataagtggatctcaaacagacaagaatgaaacaactgaagaattaaaaggggcaaaatttatcattttatatgcatattcaatgctcgttttgcttgcgttagtaatttctaacatattcattcacattttggagcctaaactatcaatcaccactcaaatcatcatcgttttgattttaattgaagcactaattggactgcgtttcttgaaagcgtacgatgttaagcgtggcaaagataaagaaaataagaaaaatagtaaggatttcgttaaactaaaatcaattttagtagcaattttatttacatcattggcgctgacagcaggtactgtagctgatatatacggtttcactgacttaggaaatactagaagtgatttaatcgtttggagcataggtggtattatatttggcctcgtatgttacacaatggaagataaaaaataacgataaggagctggcgattataaagctagctccttttttaacttatatatgtaaagcactatcctaagggtctttaatcatatgtcaataattcctataattaatactcttaaatattgtttaaataagttttaaaattttacacatatttttatttaaaaaagatgtataattaatgtattaaatatagaaagaagttgatattatgaaaaagtgtattaagactttgtttttaagtatcattttagtagtgatgggtggttggtatcattcagcacatgcgtcagattcgttgagtaaaagtccagaaaattggatgagtaaacttgatgaaagcaaacatttaactgagattaatatgccaggctcacatgatagtggctcattcactttaactgatccggtaaaatcggtttgggcaaagactcaaggcaaagattaccttactcaaatgaagtcgggagtcaggttttttgatattagaggtagagcaagtgctgataatatgatttcagttcatcacggcatggtttatttgcatcatgaactaggaaaatttttagatgatgctaaatattacttgagtgcttatccaaacgaaacaattgtgatgtctatgaaaaaggactacgatagcgattctaaagttacgaagacatttgaagagatttttagagaatattattataataacccgcaatatcagaatcttttttacacaggaagtaatgcgaatcctactttaaaagaaacgaaaggtaaaattgtcctattcaatagaatggggggtacatacataaagagtggttatggtgctgacacgtcaggtattcaatgggcagacaatgcgacatttgaaacgaaaattaataatggtagcttaaatttaaaagtacaagatgagtataaagattactatgataaaaaagttgaagctgttaaaaatttattggctaaagctaaaacggatagtaacaaagacaatgtatatgtgaatttcttgagtgtagcgtctggaggtagcgcatttaatagtacttataactatgcatcacatataaatcctgaaattgcaaaaacgattaaagaaaacgggaaagctagaactggttggctgattgttgactatgcaggatatccgtggcctggatatgatgatatcgtaagtgaaattatagatagtaataaataaggattcaataatgatattaagacgagtatgaaaatagttagattctaattattttcactactcgtttttattttgaaaataagtaataattcaacaatattataaattgaacagattgtttgtgaaatttttgataatattaaagtgaaaaagtgttataaattgataaatatatgtaattaacaaaaacaaatcattttaaaaagaagagagttgtaagatgatgaaacgattaaacaaattagtgttaggcattatttttctgtttttagtcattagtatcactgctggttgtggcataggtaaagaagcggaagttaagaaaagctttgaaaaaacattgagtatgtaccctattaaaaatctagaggatttatacgataaggaaggctatcgtgatgatcagtttgataaaaatgataaaggtacatggattataaattctgaaatggttattcaacctaataatgaagatatggtagctaaaggcatggttctatatatgaatagaaataccaaaacaacaaatggttactactatgtcgatgtgactaaggacgaggatgaaggaaaaccgcacgacaatgaaaaaagatatccggttaaaatggtcgataataaaatcattccaacaaaagaaattaaagataaaaacataaaaaaagaaatcgaaaactttaagttctttgttcaatatggaaactttaaagatttgtcgaagtacaaagatggagatatttcatacaatccagaggtgccaagttattcagcaaaatatcaagtaactaatgatgattataatgtaaaacaattacgtaaaagatatgatataccgacgaataaagcaccaaagttattgttgaaaggtacaggtaatttaaaaggctcatcagttggatataaagatattgaatttactttcgtggagaaaaaaggtgaaaatatatactttagtgatagtctacatcttgaaccaagtgaggataaataaacgtgaccaataaagagtatgaaatcgaacccggaaaaagagagtgatgaaatgataaaacgtgtaaataaattagtgctaggtattagttttctgtttttaatcatcagtatctttgctggttgtggtacagggaaagaagcggaaataaagaaaagttttgaaaaaacgttgagtatgtatccgattaaaaatctagaggatttatacgataaagaaggatatcgtgatgatcaatttgataaaaatgataagggaacatggattgttcgttcgtcaatgtcgattcaatctaatggaaaagatatgaatataaaaggcatggttttatatatgaatagaaatacaagaacaacaaatggctattactatgttgatgttatagaaagagaagataaaggtatacatcgtgataacgaaaaaagatatccggttaaaatggtcgataataaaatcattccaactaaagaaattaaagatgaaaacataaaaaaagaaatcgaaaactttaagttctttgttcaatatggcgactttaaagatttgtcgaagtacaaagacggcgatatatcatacaatccagaggtgccgagttattcagcaaaatatcaattaactaatgatgactataatgtaaaacaattacgaaaaagatataatataccaacgaataaagcaccaaagctattgttgaaaggtacagggaatttaaaaggttcatcaattggctacaaaaaaattgaatttactttcgtagagaaaaagggagaaaatatatactttagtgatgggctacattttaatccaagtgaggataaataatcatgattcgatcaaattatgaaatcgatccaggaaaaacaataaaaagaaataggattgtgaaattatgaaacgattaaatacattggtattgtacatcagttttttgatattaatcatcagtatcgttgctggttgtggtacagggaaagaagcggaaataaagaaaagttttgaaaaaacattgagtatgtatccaattaaaaatctagaggatttatacgataaagaaggctatcgtgatgacgaatttgataaaaatgataaaggaacgtggactattagttctgaaatggcaattcagaaaaagggagaagccttaaatataaaaggtatggttttgaagttaaatagaaatacaaggagtgcaaaaggattttactatgttaatgcgataaagaaggatgaaaatggcagacctcaggataagcaaatagaatatcccgttaaaatgattgacaataaaatcattccaactaaagatatcaaagatgaaaaaataaaaaaagaaatcgaaaactttaagtttttcgcgcagtatggcaattttaaagatttgacgaagtataaaggtggagatatttcatataatccagaagccccgatttattcagcaaaatatcaactaaccaatgatgattataatgtaaagcaattacgtaaaagatatgatataccgacgaataaagctccaaagttattgttaaaaggttcaggaaatttagatggttcatcaattggatacaaaaaaattgaatttactttcgtagagaaaaaaggagaaaacacttactttacagctaacctacattttaaaccgagtaatgatgaataatcgtgactaataaagagtatgaaatcgattcaaggaaacaaaataaaaagaagagagttgtaaggtgatgaaacgtttaaataaattagtgttaggtattagtttcttatttttagtcattagtattactgctggttgtggcatgggtaaagaagcggaaattaagaaaagttttgaaaagacaatgagtatgtatccgattaaaaacctagaggatttatatgacaaagagggctatcgagatgatcaatttgataaaaatgataagggaacatggattgtaaattctcaaatggcaattcaaaataaaggagaacctatgaaatcaaaaggcatggttctgtatatgaatagaaatacaagaacaacaaatggctattattatgttaatgtgattaagggcgaggataaaggtaaacatcaagacaatgaaaaaagataccctgttaaaatggtcgacaataaaataatccttactaaagaaattaaagatgaaaacataaaaatagaaatcgaaaactttaagttttttgttcaatatggaaactttaaagatttggaaaattataaagatggagatatatcatataatccagaggtgccaagttattcagctaaatatcaattaactaatgatgattacaatgtaaagcaattacgtaaaagatatgacataccaacaaataaagcaccgaagttgttgttgaagggtacagggaatttaaaaggttcatcagttggatataaagacattgaatttacgtttgtagagaaaaaagaagagaacatttactttagtgatgggttaatttttaaaccaagtgaggataaataatcatgactcgattaaaatatgaaatcaatccaggaaagataataataagaataggattgtgaaattatgaaacgattaaacaaattggtattgtatattagttttttgatattagtcattagtttcactgctggttgtggcatgggtaaagaagcggaaataaagaaaagttttgaaaaaacattgagtatgtatccgattaaaaatctagaggatttatacgataaagaaggctatcgtgatgatcaatttgataaaaacgataaaggcacatggattattaattctgaaatggttgttcaacctaaaggggaacgtatgaaatcaaaaggtatggttctatatatgaatagaaacactaagactacaaccgggaagtatatagtgagtgaaacacttcatgatgaagatggtagacctaagagtaaagataaagaatatccggttaaaatggtagacaataaaatcattccaactaaaggtatcaaagacgaaaatataaaaaaagaaatcgagaattttaagttcttcgcgcaatatggcagctttaaagatttgtcgaagtacaaagacggcgatatatcatataatccagaggtaccgagttattcagcaaaatatcaattaactaatgatgactataatgtaaaacaattacgaaaaagatataaaataccaacgaataaagcaccaaagttattgttgaaaggttcgggagacttaaaaggttcatcagttggatataaagacattgaatttacttttgtggagaaaaaaggtgaaaatactttttttactgatagtctacatcttgaaccaagtgaggataaataatctcctgcctcccacacgattcaacacgaatttcaaatatgttgctgtaaaataatgtaaaataaacgtattcatattactgaattgagggatagtatgcaacgtgattatttaattcgagtagaaactgaaagcatgccagatttcaaaaggctcaatggtttaatgattggttttgttattaaaggtgaggcacatatttatgatgaaaataacatgacgcaatgcaacagtggcgacattttcatcattaaccaccgtgacttgtatcgatttcaacttcaacaagatggcatcatatgttatatccaattccaaatgaaatatttggcagacaagtttgatgatgcgcattgtctatattttcacttaacagatgcgaccacaaccaagaatatacatcaactgagaaatataatggcaagactggtttcaacacacattcgacataatgagttgtctaaattgactgagcaacaacttgtgattcagttgcttatgcatatgattcattatgtcccgcgtacatatcattcgaaccaaagtatcttaaatgatgataaagtgaatcaagtatgcgactatatcgagttacattttcatgaagatttaagcctttcagaattaagcgaatacgttgggtggtcagagagccatctgtctaaaaagtttacagaatcgctaggtgtaggattccaacatttcttaaatacgacgcgaattgagcatgcgaaactcgatttaacatacacagatgaaacgattactgatattgcattgcaaaatggcttttcaagtgcagcgagctttgcgagaacatttaaacactttacgcatcaaacgcctaaacaatatcgaggtgatcgtccagcaatcactgaaaatcaacaatcggcacaacataattatcacgaccgtgaattgatattacttttaaatgactacattgaagaaatgaatcatttcattgaagatattgaaaagatgaactataaagagattgcctttaaaccaactaatcaacaactaaatcaatttaatcatattattcaagtgggctatttgaggaatttgctcaatacacagtatcaatcacagttgcttacatgtcatcatgattttcaagtcaatgaagtattagcatatgatgtgatgccatatattatgaaaaagctcaatgcgccattcacgtatgatgcagagatttcgaatatattttatgatatcgatttgtgtttagactttttattagatcataactttagtctaaccatgcatttgaatcagtatgactcacgagattatatcgatgcattcaaagtatttatccatcacgttgccctgcatgtcagtcatagaaaagatttgaagttcaacttgtatgtgacgacattgcacacgtctttaattgaaatgattgattattttaaagcattattccctaatggtggcttgtacattcacttagatcaagctacggaaagacatctaccattgttgaaacgacttgagccacacatcaaccattttgtatttgatgccaattcaaatgatgctgttgattttaataaaatgaatgatgatgaatttaaaaccgcgagtcaaatgattattaataaaacgaattaccttatcgacttaatgcatcgccataacctaaagcgtccactcattttactcaattggaatacattgacgggtgatacatttattacaaacggcgaatattttagaggtggtatcatcattgagcaattattaaaattaagtactaaagtagagggtatcgggtattggttgaattatgatttgcacgtcagtcattgtagaaatgaacgggattatatgaattctattgaactgtttcatcaatataatggaaaacgtccggtctatttcacggcattgctatttaataaattaacaagcaatattttgtattctgatgatacatgtattgtcacgggaactgattcaaattttcaaatattgttatatgatgcaaagcattttaatccgtacttagcgttggacaatcaaatgaatatgcgtgcaacggaaatgatccatttgaacattaatgccctagaagacggtatgtataagattaaacattttaccttagataaagaaaatggtgcgttatttaatctttggcgcaaacatcatacgatacatggcatggacaaggactctatagattacgttaatcgaatgagttttccgaaattagaagtatatgatatagatatcacggacacactggcattaaacattaaaatgattacgaatgggattcacttaattgaagtaaaacgttacccaagttcataaaatgatcacaaatcacaaattttgatatacataatttgtgattttttatattcaaagctaaaattgcaaaaaattaatggttaacatctctgttgttggcaatataaataatgattaatcatttatgatgtaactaaggagatgaaggatatgaatcaacaattaattgaagctttaaaatctaaagaagacaaaatgattgagatcagacgttatttacatcagcatccagaattatcttttcatgaagatgaaacggcgaaatacatcgctgaattttacaaaggtaaagatgtggaagtagaaacgaatgtcggaccacgtggaattaaagtaacgattgattcagggaaacctggtaaaacattagcaatccgtgcagactttgacgcattacccattactgaagatacaggattatcttttgcatcacaaaataaaggtgttatgcacgcatgtggtcacgatgcacatacagcttacatgcttgtattagcagagacgcttgctgaaatgaaagatagttttacaggaaaagtcgttgtgatacatcaaccagctgaagaagtaccaccaggtggtgctaaagcaatgattgaaaatggtgtattagacggtgttgatcatgtattaggtgtacacgtcatgagcacaatgaaaacaggtaatgtgtattacagacctggttatgttcaaacaggacgcgcattcttcaaattgaaagttcaaggtaaaggtggtcatggttcatcaccacatatggccaatgatgccattgttgcaggtagctacttcgtcacagcgttacaaacagttgtatctagacgactaagtccatttgaaaccggtgttgtcacaatcggttcatttgacggtaaaggtcaattcaatgtcattaaagatgttgttgaaattgaaggtgatgtacgtggattaacagatgctacaaaagcaacaattgaaaaagaaattaaacgtttatcaaaaggattagaggatatgtatggtgtaacttgcaccttagaatataacgatgattatccagcattatataatgatccagagtttactgagtacgtggctaagacgttgaaagaagcaaaccttgattttggtgttgaaatgtgtgaaccacaaccaccttcagaagactttgcatattatgctaaagaacgtccaagtgcctttatttatacaggtgcagctgtggaagatggtgaaatttacccacatcatcatcctaaatttaacatttcagaaaaatcattacttatttcggcagaagctgtagggacagttgttttagattaccttaaaggagataactaacatgaatgaaacgtatcgcgggggcaacaagttaatcttaggtattgtattaggtgttattacattttggttgtttgcacaatcacttgtaaatgttgtaccaaatttacaacaaagttttggtgcagacatggggacaattagtatagcggtcagtctaactgcactattttcaggtatgtttgtcgttggagcaggtggtctagcagataaaattgggcgcgtgaaaatgacgaatatcggtttattgttaagtattattggttcagcattaattattattacgaatttaccggcattattaattttaggtcgtgttatacaaggtgtatcagcagcgtgtattatgccttccacattggccattatgaaaacttattatcagggtgctgaacgtcagcgtgccttaagttattggtctatcggttcttggggtggcagtggtatctgttcactcttcggtggtgcagttgcgacaactatgggttggagatggattttcatcttctcaattatcgttgccgtactttcaatgttactcatcaaagggacgcctgaaacgaaatcagaaattaccaatacacataaatttgacgttgcagggctaattgttctagtagttatgttgctaagtttaaacgttgtcattactaaaggtgcagcacttggttacacatcattatggttctttggtttgattgcaatcgtaattgtagcattctttattttcttaaatgttgagaaaaaagtagataatccacttattgattttaaattatttgaaaataaaccatatacaggtgcaacgatttcgaacttcttattaaacggtgttgcaggtacattaattgtagcgaatacattcgtgcaacaaggtttaggttatacagcattgcaggcaggatacttatcaattacttatttaatcatggtgttattgatgattcgagttggtgaaaaattattacaaaaaatgggttctaagcgaccaatgttattaggtacattcattgtggtcattggtattgcacttatttcattagtattcttaccaggcatattttatgttatcagttgtgtcgtaggatatttatgtttcggactaggcttaggtatttatgcaacaccttctacagatacagctatttcgaatgcaccgttagataaagttggcgttgcttcaggtatttataaaatggcttcatcacttggtggcgcattcggtgtcgcaattagtggtgctgtatatgttggtgcagttgctgcaacgagcattcatacaggtgcgatgattgcactttgggttaacgtattaatgggaatcatggcatttatcgcaattttattcgcgattcctaatgatgataaacgtgtcaaagatgcgaaataataacgatgacacgccaagtgttttgataatgatataaatgaaagtaaagcaaattaaatgaggaaatgtatagagcagtgcatatagataaatctatgattggattaacactaatataaatataaatgaaaaaccatccacttaaacttttgataagttaggtggatggttatttattgcgttgttctaaaaatttggacatttatatagaaggaactatatataatgtgaaggttatggcaattcgcttcaatgaaggcgacgtgaaagtgaatactaaatgattcgaggtcagactccgagaacagtgtccgtcatgcttaccgcatactaatgaagcattattatatcagtgtttatagccgatttaagataataaagtttgctaaacaaaaaagccaatccattgatgttggattgaccttgtatatgcctctgaatctctaattttaaaaaatatgaatataaataagacattaaaaattaaatttcagttgttgcaatttcttcatctgtaggtacatcatcgttaagaccaacaagtgcttcagaaacatttcgtgaatgataaccgatacgttcaagaacaccaatcatatcgatatatagtaatccgccttttgttgtacattcgccacgattaaggcgtttaatatgacctttgcgtagtttatgttcaatattaaatgattctctactacgttctacaatttcatcttttttcgttttgtcataaacatctaacatgtcgatggctttatcaaatgactcagcaacatggttgaataatttatccataccgcgttgtgcatcttctgtaatgcgaatatcttcatcatgttggcgttttaattgagcgacatactcttctgttagctctgctacttttaaaatagagcgattgacatcaaacataactgctaaacgctcaacgtctgccttcgtaatggcttttgtagaaattctaactaaataatttcgaatgctatcattgattgtttcaacagcttggtgcttttgttcaagcttcttgatcaattttttatcgtcttttgtaatttcgcgaatgtcttcaaacattgataagacaatctgacccacattttgtaattctttttgagtttcttgtaatgcaacaccaggtgcgtgataaacaagatctttgtttaagtgctgaggtttatagtcatcagcaatatctttacctgggacaagctttgtaactatccatgctaaacctgctacaaatggtaattgaatcaaagtatttgttatgttgaaggtaccatgtgatactgcaatcgtcatcgctggttttaagtgccatacatcttgtaacaaactaatcaaatgaatcacaactggcaagaaaattgtgaagataattaccccgattaaattaaagatgacgtgtacaagcgccgcacgttttgcagcgattgagccggctaaactagctaagatagctgtaattgttgtaccaatgttatcacctagtaacacagggattgctgcgtttaagctgattaaatcttgttgataaaattcttgtaaaataccaatcgtcgcacttgaactttgaactagtgctgttaaccctgcgccgacaatgacagcaagtattggatttgatgacatatcaagcattaattgcttaaatccatctaatgatgctaaaggtttaacggcatcacccataaattctagaccgaagaatagagaaccgaaaccgaatagtatgcggccaatgttattgattttagagcgtttaaagaaaaagattaaaaatgcacctaatgctaaaattggcattgcatattcgcctaaatctataccgataataaatgcagttaccgttgttccgatattggcacccattatcactccaatagcttgttttaacgtcataaatccagctgttaccagtccgattgtgataacggtcgtacctgaactactttgtattaaaatagttacaacgatacctgcaataacacctaatactggatttgatgtaaatttgtttaaaatatctcgtagcctgtctcctgctgatgcttgaagcccgtctcccatgatttttaagccgtaaaggaaaatacctaaaccacctaaaaaggagaaaatgacttctgtaaccgacatttccattatttcacctcaaataagctttatatttagattatcgcttataattgtaaatttaatgttaagattaggtaaaattatttaacaatatatgttatttgtatatgacttgtaaaatatcgtcacttattatgtaaattttcagtgtgaaatggcaggtttgcaataaattgtttaacaaaatgatgcaatcaatcatgtaattatgtttcatcaaaaaaatcatgtgagtgggataacgaaataaagtttgtgaacatatcatttctatcccactccatgatttgaaatcaccaaataaaaatctattaatggttttcgttataacaatttgtgttcttttaataatgtctcaatgtacgtaccttttatctttttaaggaatcctgctaatgcgagtttctgcattttcgaatctttagtaatctcgcgcaaatcttgatggtcattcagttcgtatacggcatccattaagacgcgaagatcaaatgtactattgatgacctctggaataccacgatctatatttagtaattgataaacagcttccatggcagtacgaaccgaatattctgttgtaaatacagtatctcgctctgtttctgcaaagttaccaataaatgataaattttgtgattgatgcgggacgactaaaggtctgtcgccgatagcacgcgtcatgaaataagaggtgatatatggcatataaacaggaatcgtattagatacatgttttgctaagtcttcaattttgtcagttgatacacctaagtgatacagccattcttggcatatttcattaccactacattctgtaattggctttttaatataatcgccgtttacatctgaatataaggcataaatccatgtagatatttcattttcaggttggtctttaaactgttgctgacgattgattgtaaaactcatttgccatgcagaatcattgattgtaataataccgcctgtaactgttttgcctgcaagtgggtcacgtttacaaatactttctattgtatcgataatctctttattgtttgttgtagaagttgctgaaacaaaccaactttttttaggaatattttggcaaaacttatcaggattaccaaattcaggactttgtcgcgctaaatttttccatagtgtccaactaccacctaattcgtcagttggtggtgctggtgtatcattatcaccatacgtagagctttccgtaatactaccgtttgtcacaaagacaagatcatctacagtcagtttaattgactctgctttgccatgtcggtgaattaatatttctcgggcaattttttgacttgtcgtaacatctactttaatatcttctacttttacatcgtattcaaattgaaccccatgcgattttaaatattcaaccataggtaatactaaagattcatattgattatatttagtgaattttaaagctgaaaagtctgcgagaccaccaatatgatgaacgaatcgcattagataacgacgcatttccatagcagaatgccacggttcaaatgcaaacatcgttttccagtaaatccaaaagtttgaattaaagaagtcatcggaaaatacatctgttattttgacatcatctaaatcttcttcattcgttaagcataaatctaaaatttctttaatcgccgttttagtcaaagtgaagtctccgtctgtgactaaacgttgaccctgtttctcaataacacgacagcgagaatagttagggtcttctttgtttagccaatagaactcatctaatacagacgcgttatcgatttctaatgaagggatagatctgaataagtcccacaaacattcaaagtggttctccatttcacgaccaccgcggacaacatagccttttaaaggcatattttcaccatcaagactaccacctgctttaggtaactcttctaaaatatgaatcttcgaaccttccatttgaccatccctaattaagaaacaagctgccgcaagtgaagctaacccagacccgattaagtaagcagatttgttttctacattttcaggttttttagggcgcgcaaatgcttcataatttccataactgtaatacatatccaccaagtcctttcgtattagaatacactcagactatacccctttgtgaattgtaaatattagtatttatattggtaaatttgacgaaattagatcatttttatatttttgatttttaaaattttatcactcgaatgtttttggattctgaggtgcgggacttggaataattatgtattttgaaagaagttacttaaactaacgcctagtagagtgataattccgcctataatagcaagggttgttggtagctcgtctaataacagataagataataataaagaaacgataggtgttaaataaagagacattgttgcatcagagacaccaactgacttcacaatataagcaagcaaaacgtatggaattatagtagggaatatagctaaataaagtaccgatactattgatgtaaaagtggcgccgtgtatatcgttgatgatttcaggaataaaaataagcataaatggtgagcttgccattattgtatatagtgtgaaagcgatgaagccgtatttttctatgtattttttctggaaagtaaaatacaaactttcactaaaagatgcaagtaaaataataaaaacacctaatacattaatagttgtgtaatcatctttacttattgaaataatggatattcctataaatgcgacgagtgaacttaaccaattccattttgaaaaatgctcttttaaaaatatataagctaaagcactagaaaaaataggcgttgtagagactagaattccagatatacctgcactaatcaaagtttcaccaaaatttaaagctgtgtgatatatcacaaatccacaaaatcctaaaataaaaataacagggatatctcttagttcaggggtaggcaatttctttataattacgaacggcaagagaattattgttgctaaaattaaacgaaatgccgacaatgattctgcactaaaatcatttaacgcaatctttatcattggaaatgcagatccccacaatatgatagtaaataaatatgatagaaaagtagtgtctcgaagtttattcattaatatcatcactcctttaattatgtgtttctatattaaaaaatatgatttaaaatgagtacaaccaattttgaatggatttacctatccaattttaaaagggagggagaagatggctaaatattaagatattgctagtgacataagagataaaataatcacaggggattggttttatggaatgaagatacctccacagaggcagttggcgatacaatacaacgtaaatagagtgacgattattaaaagtattgagttattagaggctgaaggatttatctatactaaagtggggagtggaacatatgttaatgactatttgaatgaagcacatattacaaataagtggtctgaaatgatgttatggtcctctcaacaaagaagtcagtatacggtgcaattaattaataaaattgagacagatgattcgtatatacatataagtaaaggtgaattgggtatatcgttaatgccacatattcaattgaaaaaagccatgtctaatacagccagtcatattgaagacttatcttttggttataataatggctatggttatatcaagttaagagatattatcgttgaacgaatgtcaaagcaaggtataaatgtaggtagagaaaatgtaatgatcacttcaggcgctttacatgccattcaacttttatctattgggtttttaggtcaagatgccataataatttcgaatacaccatcatatattcactctacaaatgtttttgagcaattgaattttagacatattgatgttccttataatcaaattaatgaaattaataccatcattgatagatttattaattttaaaaataaagcgatttatatagaacctaggtttaataacccgacaggtcgttctttaacgaatgagcaaaagaaaaatataattacttatagcgaaagacataatattcctatcattgaagatgatatctttagagatattttctttagcgatccaactcctgctatcaaaacttatgataaattgggaaaagttatacatataagcagtttttcaaaaacgattgcaccagcaataagaataggttggattgttgcttctgaaaaaataatagagcaattggcataagaatgcaaattgactatggatccagtattttgtcacaaatggttgtatatgagatgttgaaaaataagtcttatgataaacacttagtaaagttaaggtatgttttaaaagataaacgagactttatgttaaacatcctcaataatttatttaaggatatagcacattgggaggttccaagtggaggttattttgtatggttagtctttaaaatagatatagatattaaatatttattttacgaattgttaagtaaagaaaaaatattaatcaatccgggttacatttatggcagtaaagaaaagagtataaggctatcttttgcctttgaatcaaatgaaaatattaagcatgcgctctataaaatttatacatatgtgaaaaaggtttaattaaaacaataattcgaatcattatgtggcatgttaaacagctaaatataagctatgcacatttaacaagcggatactcctgacgcaattatagtatcattacatattgtttaatcgtttggggtaatgtaattaaaaggtaaaataggcagagtgttatacataaaatgtaaagaaagaggcgatagaatgtctaaaatcaggtcttttacaatattaagtctacttatttacttagctatgatgtgctatacagtagtgacctattcaaaattaccaaccaaagtacctattcactataatttagcaggggatgctgataactttgctgataaatgggtactgcttttgataaatagcgcatttatagtgatttggcttatatttttcattgcaggtagatactatgaacgatttgccaaatggtcacattataatcatacaccacgtgaaattcgagcgattaaattatttttaagtacgttaaatttagagattatgagctatatgtctatcttcacagtattagaaatttggcaaatacaacaccatcatcaattaaatttactatggtttaatatgatatttatcattatcattggtttaacgcttgtcatattttgtttacttcctacaattcacaaaatgagagattctcaataaaaatataaactgtcatgatgcatttttgaagcggattcctgatattattataaataatatctagtatttataattaaaatgatatattatttattatagttgaatattgtgtatattttgtgaactttttgtaaaaattcgattgcctgtcacatataggagtgttacattttaaatatgtgatcatcgcaaaatataagttgaaataggttgtagattaatcagaatgataaatattttatataaagagagggagtcattatgacactacttactgtaaatccattcgataatgttggattatcagccttagttgcagcagtacctattattttatttttattatgcttaaccgtttttaaaatgaaaggcatttatgcagcattgacaactttggttgttacattgattgtggctttatttgtatttgaattaccagcgcgtgtatcagcaggtgcgattacagaaggcgttgttgccggtattttcccaataggatatatcgttttaatggcagtttggttatataaagtttctattaaaacaggacaattttctattattcaagatagtattgcaagtatttcagaggaccaaagaatccaactattattaattggattttgtttcaacgcatttttagaaggtgcagcaggatttggtgtgccaattgcgatttgtgcagtattattaattcaacttggatttgaaccattaaaagcagcgatgttatgtttaattgctaatggtgcggcgggtgcctttggtgcaattggtttaccagttagtattattgatacgtttaacttaagtggaggcgttacaacattagatgttgcgagatactcagcattaacacttccaattttaaactttattattccatttgttttagtattcattgtagatggtatgaaaggtattaaagaaattttacctgtcattttaacagtgagtggtacatatactggattacaattattattaacaatattccatggtccagaactagcagacattattccatcactagcaacaatggtggtgttagcatttgtttgtcgtaaatttaaaccgaaaaacattttcagattggaagcgtctgaacataaaattcaaaaacgaacgcctaaagaaattgtctttgcttggagtccgttcgtaattttaactgcctttgtattagtatggagtgcaccattcttcaaaaaattattccaacctggaggtgcacttgaaagtttagtaataaaattgccaattccaaatactgtgagtgatttatcgcctaaaggaattgcgttgcgtctcgatttaattggtgcaactgggacagcgattttattaacagtaattattacaattttaattacgaagttaaaatggaaaagtgcaggtgctttattggtcgaagcaattaaagaattatggttaccgatccttacaatttcagctatcctagctattgctaaagttatgacatacggtggtttgactgtagcaattggacaaggtattgctaaagcgggagcaattttcccattattctctccagtattaggttggattggtgtgtttatgactggttcagttgtaaataacaatactttattcgcacctattcaagcgacagtggcacaacaaatttcaacaagcggttcattacttgtggcagctaacactgcaggtggtgtagcagcgaaacttatttcaccacaatcaattgccattgcgactgcagctgttaaaaaagttggtgaagaatctgcattattaaaaatgacgttaaaatacagtattatatttgttgcctttatttgtgtttggacgtttatactaacgttaatattctaaatataaataatgttgtcacttggattcaaatgacattttaaatctaattattcatgaatcgaactagtacgaaatgcaatgagcatcttgtctagttcgattttttaatgtctaaaaatgtcgtatatgtaatcagagtagaaagtgttgaggcgtttcagaagttgtttagaaaagtaagtaaaataaaaaatgcactgagcaacaaaagatgttgctcgtgcatttagatgattcttatcatttcaaataagaatgtgttaatcaacgtatataagttaaaattggtttggataaaatgatatctatcgttgtgtattgtttgtttttatagttcgcgacgacgtccagctaataacgctgcacctaaggctaatgataatccaccaaatacagttgtaccgatgaatggattttcttcaccagtttctggtaatgcttgagctttgttagcatctgcatggtttgctggttgcttcttatcaacaacaagttcttgaccaggtttgatcatgtttttatcagctaatttgttatctgcagcaattttgtcagcagtagtgccgtttgcttttgcaatgtcatttactgtatcaccaggtttaacgacatgtactccgttgccgtcttctttaccaggtttgttgccgtcttctttaccaggcttgttgccgtcttctttaccaggcttgttgccgtcttctttaccaggcttgttgttgtcttctttaccaggcttgttgccgtcttctttgccaggtttgttgttgtcttctttaccaggcttgttgccgtcttctttaccaggttttttgttgtcttcctcttttggtgcttgagcatcgtttagctttttagcttctgctaaaatttctttgctcaccgaaggatcgtctttaaggctttggatgaagccgttacgttgttcttcagttaagttaggtaaatgtaaaatttcatagaaagcattttgttgttctttgttgaatttgttgtcagcttttggtgcttgtgcatcatttagctttttagcttctgctaaaaggttagcgctttggcttgggtcatcttttaagctttggatgaaaccattgcgttgttcttcgtttaagttaggtaaatgtaagatttcatagaaagcattttgttgttctttgttgaatttgttatccgctttcggtgcttgagattcatttaactttttagcttctgacaataggttagcactttggcttgggtcatcttttaagctttggatgaaaccattgcgttgttcttcgtttaagttaggcatattcaagatttcatagaaagcattttgttgttctttgttgaaattgttatcagctttcggtgcttgagattcgtttaattttttagcttcacctaaaacattagtgctttggcttgggtcgtctttaagactttgaatgaagccgttacgttgcgcttcgtttaagttaggcatgttcaagatttcatagaaggcgctttgttgatctttgttgaagttattttgttgcgcatcagcttttggagcttgagagtcattaagtttttgagcttcacctaaaacgttagcactttggcttggatcatctttaaggctttggataaaaccattacgttgatcagcgtttaagttaggcatatttaacacttgataaaaagcattttgttgagcttcatcgtgttgcgcagcatttgcagcaggtgttacgccaccagatataagtaatgtacctaaagttacagatgcaatacctacacctagtttacgaattgaataaatgtttttctttttcaaattaataccccctgtatgtatttgtaaagtcatcataatataacgaattatgtattgcaatactaaaatctatatttataattaaatttaaatgtaagttttacaacttataaaataaatattttgctgaaagatttattcaggaagtaaaaggcttaaaaccgcaaaatcacgctatttcgattaataaaaacagataaaatatagagatattttttataatgaaagcggtttaatacatatgagttaaaaaatatttttaagaataaagtggggctttgaatgtgctgaggtttaatttcggaaatggttttaagtgatatagaaaatagaaagttgttcattatgtgctgaggttttattaaaaaatagaaaacacaagtgcactttagaatacagcacacttgcgtaatagagatattattcaaaaacaagatgtaaatgatctttatctgctaataattgattcacttgagctaataattgttcagcatggtcttgctgcgcgtcatccatatgaattaaaatttttctttcatcttcagttgagcgttcttttattagatagccttgcttttttaaattattgagagctctaacagtttgagggtatttatggtggattgtttcaattaaatctttaagaagaacgatgtttttattttgagaagtgataatagctagaattgtgaattctacaaaacttaatgttagatgttttttgataatattcttgaaatacattgtatacatcatcaagtttagaaattctttactatcttttggtatcatctgtgattcactttgatctgcaaggttaaattgtttaatgatttgatcaaacaatgtaacacgttctgcaattttctctcgttgttcttcagatattgaaatgtaagtattacgctcatcaattttacttcgaactttactaatatatgaatgtttcacaagtacttttatatgctgtactaaatccgattgtttataacataaatctgaaacaatcttcttaaatggaagtgtgttttcttgctgatgaaataaataagtcagtaatataaattcttttatagtcatatcgacttcaggcttgacttttttcttaaaacgaaacatatatgcttcaatgattataaaatctctaattttgtcatggttattatatttcattgttttatctccttgtatatgcactttattttaatataacacaatataataagaaaaataatccataatttacaattaaaaataatatgatatttttattaaaatttgtgtttttgaataaatgacattatcaaacactatatttaaataagaaatagttatcgatatttgaaaaatcgaagaatattgattgatattatagaatatgagtcggtgttatttgtatataaagtattaatatgtaattaagaaagtcgacgcttgttaacaataacaacaactatatgtataaaaaaacctcgcaactgttagttaactgaatcatttagctaacttcgttgtgaggtcattttgttttaataatatcgttataactttttcacggttaataataagtatatgaagaatggggcaccaaaagcagcaataaatacacctgctggcacttctttaggcaagaataaggtacgcccaattaagtctgcaataacaattgatatggcaccaatcattgctgacattagtaactttttagcataacttccgcgaacgattgttttcgcgatatgtggtgcgattaaaccgacaaacccaatgttacctactaaactgattgccatagatacgagtatagtagaagtgattaattggattagtttcatacgttgtacatgtaagcctaagccaatcgctacagggtcatcaagtatagatattttcatttttggtataacaagaaataacaacggcacaacagctaaaataaccatacccaaaatgattgtatctttaaacgtagcaccgtaaagacttccgactagccatgtataagctttggcagcagataattgcttcgttgtaatgagtaatccttggacaagcgcaataaacaacgtttgcatcgaaataccgatgattatgagtattgtcgggcgtatttgtcctttcgtttgaaacactaatagtatcatcattgcaactgcgccacctaatactgcaaatagtggaagtaaatgtatcgttaaatggctgaaaaatgcaataaagacaacagcacttaagctagcaccacctgtgataccgataatatcaggtgaggcaattggattttttaatacattttgcaacattaaaccactcattcctagtgcggcacctgctaaaatcgcaagtgtaatgcgaggtaagcgtaatacttctaaagtgaattgatccatactgtcatttggatttataaagtacatcagtacgcgttgtaatggtataaagcttgaaccaatcatcatacttaccactgaaacgatggctaaaaagattaacgcgaagatgagatggtaattgtcttttttattaatcttttcggtcataagcgttgacgtcctttcttcataatatagattaagacaatagcgccaatgacagcggtaacgacaccgataggcaactctagtggcttaattattatacgagcaacaatgtctgaaatgatcattaggattgctccagctaatgcagtaaaaggaattaaatacttatagtttggtggtaataatcgtttgctaatattcggtacgataagacccacaaagacgattgatccagctacggctaccgaaataccggctaacatactgatgagcataataatcatccatttgattaattttatgttttgaccgaggccggttgcaatgtcgtcacttgtcatcaagatgttgatgtgtgcagccatgctaaatgcaattaaaataagtatcaatacaagcggaataatccatgggatatcccaaatattacgtaatgaaacggagccacttaaccaaaataataggccttgtaagtctgtttcgttcataataagtatgccttgagtaaaggctgtaaatagcatcgcaatcgcagcacctgccaaaatgacacggtgaggtgagaatagtgtttgtctaaacatacctagcgcaacaactaatatagtaacaacaatggcacctaaaaatgcaataactacaatcattttaaaagattgaatttggataaatgtaatactaaaaatgacaaaaaatactgcgcctgcattgacaccgaaaagccctggtgaggctattgggtttcgtgtaagtgcttgcatcaacaaacctgagacagcaagggcagcaccagtcaataacgcaatgattgttctcgacgcccgtgcaccagtgacaacatcatgtaaatcgttttcactatcaaagttgaataacgcctgtatcaccgtacctggtgacacaagcgtatttccaatcattaaacttaagatagctactattgcaagacataaaccagcaataacgatttggtattttggtttaagtagcatcgtaaaactccttaattattttgattgtttttcaatatttaacttttcatataaatcgtcaataagttttaatgaagatttatatccgccagctaagttccaagtgatttcatctaaatcatcagatacttggttgtttttaactgcgtctaaatttttccactctttacttgaagtccattcgctttcagtctttttaactaatgcagcatctttcgcatttggatctgattttactacaaaaatatgatcagcgttcattaatggaatgctttctttagatgtaagttggataatatctttaccattatcaacttgtttttgtaagtctttattacgtttgaatcctaaatcatttaagatttcaccagcatatccaccagcataaattcttgtatgatcagcacggaagttaacaactgaagctttcaatggccatgcatctttatactttgcttttgcatctttttggaatgcagctactttatcatcgtactttttaagtaaatcttcagcttctttttctttccctaaagctttccccattaacttagttgtatctttgaatttgaaaactgtatcagtagaaactgttggtgcgattttagataattgatcgtaaactttttcatttctaacttttgacgcgacaattaagtccggttttaatttagagatttcctctaagttaggtgcaggttcttgacctacaatcttagtatcttttaaatcattttttatgtattcgaatttcggtttttgtgtccatgattctacagcacctacaggtttaacacctaaagatacagcgacgtcagtggcaccttgatatagcgtaacaacacgctttggtttccctttaatttcagttgtacccattgcatgtttaattgaagttgtttccttatctttgttatcagatgattgtttatttgaattcccactacatcctgctaaaacaagtaggaaagcaagcgtaacaacaagcattttaattactttattcattgactaattagcctccttcgtgatgtatgacaatgagaatcattatcacgatttagtatgaattaaattttttcctaagtcaataaaatatttatgatttacatgcaacttataattatttgacatataaatgcataaaaaatataatcctaattacttgatagtgagaatcattatcaattaggtaacacacaatattatagaattttaaatttgaggaggaagcgcttttgattgaaaaaagtcaagcatgtcacgattcattgttagattctgtagggcaaacacctatggttcaacttcatcaactatttccgaaacatgaagtgtttgcaaagttagagtatatgaatcctggaggcagcatgaaagatcgacctgccaagtacatcattgaacatggtattaaacatggtttaatcactgagaatacacatttaattgaaagtacttctggtaatttaggcattgcgttggcaatgatagctaaaatcaagggattaaaactcacgtgtgttgttgatcctaaaatatcaccaacaaatttgaaaattattaaaagttatggtgccaatgtagaaatggttgaagaacctgatgcacatgggggttatttaatgactcgtattgcaaaggtgcaagaactgttagccactattgacgatgcatattggattaatcaatatgcgaatgagttaaattggcaatcccattatcatggtgcaggcacagagattgttgaaacaattaagcaacctatagattattttgtcgcgccagtcagcacgacaggtagcattatgggtatgagtagaaaaataaaagaagtgcatccaaacgcacaaattgttgctgttgatgcgaaagggtcagtcatttttggtgacaaacctattaatagagaattacctggtatcggtgctagtcgtgtacccgaaatattgaatagatcagaaattaatcaagtgatccatgtagatgattatcaatctgctttgggctgtcgaaaactgattgattatgaaggcatatttgccggaggttcaacaggctcgattattgcagcgattgagcagttgataacgtcaattgaagaaggtgcaacaattgtcacgattttaccagatcgaggcgatcgttacttagatttagtttattcagatacatggttagaaaaaatgaaatcaagacaaggagttaaatcagaatgaatagagagatgttgtatttaaatagatcagatattgaacaagcgggaggtaatcattcacaagtttatgtggacgcattaacagaagcattaacagcccatgcgcacaatgattttgtacaaccgcttaagccgtatttaagacaggatcctgaaaatggacacatcgcagatcgaattattgcaatgccaagtcatatcggtggtgaacacgcaatttcaggtattaagtggataggtagtaagcacgacaatccatcgaaacgtaatatggagcgtgcaagtggtgtcattattttgaatgatccagaaacgaattatccaattgcagttatggaagcaagtttaattagtagtatgcgtactgcagcagtttcagtgattgcagctaagcatttggctaaaaaaggatttaaagacttaacaatcattggttgcgggctaatcggagacaagcaattacaaagtatgttagagcaattcgatcatattaaacgcgtgtttgtttacgatcaattctctgaagcatgtgcacgctttgttgatagatggcaacaacagcgtccggaaattaattttattgcgacagaaaatgctaaagaagcagtatcaaatggtgaagtagtcattacatgtaccgtaacggatcaaccatacattgaatatgattggttacaaaagggtgcatttattagcaacatttctatcatggatgtgcataaagaagtctttattaaagctgacaaagtcgtagtagatgactggtcacaatgtaatcgagaaaagaaaactattaaccaattggtgttagaaggtaaattcagcaaagaagcacttcatgctgaactagggcaacttgtgacaggtgacataccaggacgtgaagacgatgatgaaatcatattacttaatccgatgggtatggctatcgaagatatttcaagtgcttattttatttatcaacaggcacaacaacaaaatattgggacaacattgaacctatattaagaatgcgaggtgtctgaacattgcagaatcatacagcagtcaatacagcacaagcgataatattaagagatttagttgatgcattattatttgaagatatagccggaattgtatcgaatagtgagattactaaagaaaacggacaaacgcttttgatatacgaacgtgaaacacaacaaataaagatacctgtttattttagtgctttaaatatgtttcgttacgaaagttcacaaccaattacgatagagggaagggtgtctaagcaacctttaacggcagctgaattttggcaaacaattgctaatatgaattgtgatctaagtcatgaatgggaagtggctcgcgttgaagaaggactgactactgctgccacacagcttgctaaacaattatcagaattagatttagcgtcacatccttttgtgatgtcagagcagtttgcaagtttaaaagatcgtccatttcatccattagctaaagaaaaaagaggattaagagaagcggattatcaagtgtatcaagctgaattaaatcaatcatttcctttaatggttgcagcagttaaaaagacacatatgattcatggcgatactgcaaatatcgatgaattagaaaatttgacagtacctataaaagaacaagcgacagacatgttaaatgatcaagggttatcaatagatgactatgtactatttccggtacatccttggcaatatcagcatattctgccgaacgtctttgcgacagagattagtgaaaagttggttgtactattaccgttaaaatttggagattatctgtcgtcttcaagtatgcgttcattaattgatattggcgcaccgtataaccatgtcaaagtaccatttgcaatgcagtcattaggcgcattaaggctaacgcctacgcgttacatgaaaaacggagaacaagcagaacaattattacgtcagcttatagaaaaagatgaagcactagctaagtatgtcatggtttgtgatgaaacagcttggtggtcatatatgggtcaagataatgatattttcaaagatcaattaggtcatctaactgttcagctaagaaagtatcccgaagtgctagccaaaaatgatacgcaacagctagtgtcaatggcagcactcgcggcaaatgatcgcactttatatcaaatgatttgtggaaaagataatatttctaaaaatgatgtcatgacgttatttgaagatatcgcgcaagtctttttaaaggtaacactatcatttatgcaatacggcgcattaccagagttgcatggtcaaaatatattgttgtcatttgaagatggacgtgtacaaaaatgcgtgttacgtgatcatgatactgtcagaatttataaaccatggctaacagcacatcagctttcattgccgaagtatgtcgtcagagaagatacacctaatacgctaattaatgaggatttggaaacattctttgcttattttcaaacattagctgtatcggtaaatctatatgccattattgatgcaattcaagatttatttggtgtaagtgagcatgaacttatgtcgttgttaaaacaaattttaaaaaatgaagtggcaactatttcctgggttacaactgatcagctagctgtcagacacattttatttgataaacagacgtggccattcaaacaaattttattaccattgctatatcaacgtgatagtggtggaggtagtatgccttcaggtttaactaccgtaccaaatccaatggtgacatatgattaatcagtctatatggcgcagtaactttcgcattttatggctcagtcagtttatagcgattgctggactgacagtacttgtgccattattgccaatttatatggcatcactacaaaatctatcagtcgtagaaatacagttgtggagtggtatagcgattgctgctccagctgtaacgacgatgatagcttcgccgatatgggggaagctaggtgataagatcagccgaaaatggatggtcttaagagcgttacttggtttggcggtatgcttatttttaatggcattgtgtacgacaccattacagtttgtacttgtgaggttattgcagggactatttggtggtgttgttgatgcatcaagtgcgtttgcgagtgcagaggcgccagctgaagatcgtggaaaggtattaggaagactgcaaagttcagtcagcgcagggtctcttgtggggccattaattggcggtgttacagcttcgatattaggttttagtgcgttactgatgagtattgccgttattacttttattgtctgtattttcggtgcattaaaattgattgaaacgacacatatgccaaaatcacaaacaccaaatattaataaaggtattcgccgttcatttcaatgtctattatgcacacaacaaacatgtcgatttattatcgttggcgttttagcaaactttgctatgtatggcatgctaactgcattatcaccacttgcttcatcagtgaatcatacagcgatagatgaccgtagtgtgattggatttttacagtccgcattttggacggcttcgatattaagcgcgcctttatggggacgctttaatgataaatcatatgttaaatcagtatatatatttgccacgattgcatgtggttgtagtgcgatactgcaaggtttagcgacgaatatagagtttttaatggctgcaagaatacttcaaggattaacatatagtgcattgattcaaagtgtcatgtttgttgtcgtgaatgcgtgtcatcaacaacttaaaggcacatttgttggaacgacgaacagtatgttagttgttggtcaaattattggcagtcttagtggcgctgccattacaagttatactacaccagctactacgtttatcgttatgggcgtagtatttgcagtaagtagtttatttttaatttgttcaaccatcactaatcaaatcaacgatcacacattaatgaaattatgggagttgaaacaaaaaagtgcaaaataaagaattaatacaacatgcagcgtatgcggctatcgaacgcattttaaatgaatattttagagaagaaaatttatatcaagtaccacctcaaaatcatcaatggtctatacaattatcagagctcgaaactttaacgggtgaatttcgctattggtctgcgatggggcatcatatgtatcatccagaggtatggcttatcgatggaaaaagtaaaaaaataacaacttataaagaagcaattgcgcgtattttgcaacatatggctcaaagtgcagataatcaaacggcagtgcaacaacatatggcgcaaattatgtctgacatcgataatagcattcatcgcacggcgcgttatttgcaaagtaacacaatagactacgtagaggatcgttatatcgtttcagaacaatctttatacttaggtcatccatttcatccgactcctaagagtgcaagtgggttttcagaagcagatttagagaaatatgcacccgaatgtcatacatcattccaattgcattatttagctgtgcatcaagatgttctgctcacgcgctatgtagaaggtaaagaagatcaggttgagaaagtgttgtatcaattagcagacatagatatatcagagatacccaaagattttattttattaccaacacatccttatcaaatcaatgtgttgcgacagcatccacagtatatgcaatatagtgaacaaggtttaataaaagaccttggcgtttccggtgatttagtgtacccgacgtcttcggttagaactgtattttcaaaagcattaaacatttatttaaaattaccgatacacgttaaaattactaattttatacgtacgaatgatcttgaacaaattgaacggacaattgatgccgcgcaagttatcgcatcagtcaaagatgaggttgaaacaccccattttaaattgatgtttgaagaaggatatcgtgcattgttaccgaatccattagggcaaacagttgaacctgaaatggatttattaacaaatagtgccatgattgttcgtgaagggataccgaattaccatgctgataaagatattcatgtattggcgtcattatttgaaacgatgcctgattcaccgatctctaagttagcacaagtgattgagcaaagtggtttagcaccagaagcatggcttgaatgttatttggatcgtacattattgccgatattaaagttgtttagtaacacaggcattagtctagaagcacatgtacaaaatacattaattgaattaaaagatggcatacccgacgtatgctttgtcagagatcttgaaggcatttgtctatctagaacgattgctactgaaaaacagcttgtgccaaatgttgtggcagcatcaagccctgttgtatatgcacatgatgaagcatggcatcgtcttaaatattatgttgtagtaaatcacttaggacatttagtatcaactattggtaaagcaactagaaatgaagttgtgttatggcaacttgtagcgcatcgtcttatgacttggaaaaaagaatacgcgaataacgcagtatttgttgactgtgtagaagatttatatcaaacgccgaccattgcggctaaagcgaatttgatgagtaaattgaatgattgtggtgcaaaccctatttatacacatataccaaatccaatttgttataacaaggaggtatcgtattgtgaatcaaacaattcttaatcgtgtaaagactagagtaatgcatcaactggtatcatcacttatttatgagaatattgttgtgtataaagcgtcatatcaagacggtgtcggtcattttacaatagaaggacatgattcagagtatcgttttactgctgaaaagacacatagctttgatcgtatacgtatcacatcaccaattgagcgtgtcgtaggagatgaggcagatacaacaacagactatacacaattattgagagaggctgtatttacatttcctaaaaatgatgaaaagctagaacaatttattgttgagttattacagacagaattaaaagatacacaaagtatgcagtatcgagaatcaaacccaccagcaacacctgagacatttaacgactatgaattttatgcgatggaagggcatcagtatcatccaagttacaaatcacgtttaggatttacgttgagtgataatttgaaatttggtcctgattttgtaccaaacgttaaactgcagtggttagctatcgacaaagataaagtagaaacgacggtatcaagaaatgttgtagttaacgaaatgttacgtcaacaagttggcgataagacttatgaacattttgtacagcaaattgaagcgtctggcaaacatgtaaatgatgttgagatgatacctgtacacccatggcagtttgaacatgtcatccaagttgatttggctgaagaaaggcttaatggcacagtactatggttaggggaaagtgatgagctatatcaccctcaacaatcgattcgtacgatgtcgccaatagacacgacaaaatattatttaaaggtaccaataagtataacgaacacttcaacgaaacgagtgttggcgcctcatacaattgaaaatgcagcgcaaattacggattggttaaagcagatacagcaacaagatatgtatttaaaagatgaattaaagacagtttttctaggggaagtcttaggacagtcttatttaaatacacaactttcgccttataaacaaactcaagtttatggtgcgttaggtgttatatggcgtgaaaatatatatcatatgttaatcgatgaagaggatgcgataccatttaatgcactttatgcaagtgataaggatggtttaccattcattgaaaagtggattaaacaatatggttctgaagcttggacaaagcaatttttagctgtagcgattcgtccaatgattcatatgctttattatcacggtattgcctttgaatcgcatgcacaaaatatgatgctcattcatgaaaatggttggcctacacgtattgccttaaaagatttccacgatggtgttcgttttaagcgtgagcatttaagtgaagcagcttcacacctgacattaaagccaatgccagaagcacataaaaaagtgaatagtaattcatttattgaaacagatgacgaacgtttagtacgcgactttttacatgatgcatttttctttattaatatcgccgaaatcatcttatttattgaaaagcaatatggtatcgatgagcagcgacaatggcaatgggttaaagacattatcgaggcgtatcaagaagcatttccagagttgaataactatcaacatttcgatttgtttgaacctacgattcaagttgaaaagttaacgacacgtcgattattaagtgactccgagttaagaattcatcatgttacaaatccattaggtgtaggaggtatcaatgatgcaacaactatctctgaaacatagattaaacaatggtgattcagtttatggcatttttaattctataccggacccattgatgatcgaggttatcgcagcaagcgggtatgactttgttgtgattgatacagaacacgtggcgattaatgatgagacactagcgcatttaattcgtgcagctgaagcagcgcatattataccaattgtacgtgtcactgcagtgatagatagagatatcattaaagtgttagatatgggtgcgagaggtattattgtgccacacgttaaagatcgtgagacagttgagcatattgtgaaattaagtcgttattacccgcaaggattaagaagtttgaatggtggtcgcatggcaagatttggacgtacaccattacttgatgcaatggagatggctaatgagcatattatggtgattgccatgatagaagatgttgaaggggttatggccattgacgatatagctcaagtcgaaggtttagacatgatagtcgaaggtgccgcagatttatcgcagtcacttggcataccatggcaaacgcgtgatgatcaagtaacatcacatgttcaacatatttttgaggttgtgaatgcacatggtaaacatttttgtgcattaccacgtgaagatgaagatattgcaaaatggcaggcacaaggtgtacaaacatttattttaggtgatgatcgcggaaaaatatatcgccatttaagtgcatctctagcgacgtctaaacagaaaggggatgatggctaatgcgtatagttcaacctgttattgaacaattaaaagcacaatctcatccagtttgtcattatatctatgatttagtcggactggaacatcatttgcaacatattacatcgtcattgccgagtaattgtcaaatgtactatgcaatgaaagcaaatagtgaacgaacaatcctagatacaattagtcagtatgttgaaggattcgaagttgcatctcaaggtgaaatagcaaaaggtcttgcttttaaaccagcaaatcatattatttttggtggccctggtaagacagacgaggaactaagatatgcagtaagtgaaggtgttcagcgtattcatgttgaaagtatgcatgaattacaacggctaaatgccatcttagaagatgaagataagacacaacacattttattgcgtgttaatttagcaggaccatttcccaatgcaacgttgcatatggcaggacgcccaacacaatttggtatttctgaagacgaagttgatgatgtcattgaagctgcgctagtaatgccaaatattcatctagatggctttcattttcattctatttctaacaatttagactcgaatttacatgtcgatgtagtgaaactttattttaaaaaagcaaaatcatggtctgaaaaacatcgatttccactcaaacatatcaatcttggtggtggcataggcgttaactatgcagatttaactagccaatttgagtgggataattttgtagaaaattttaaaacacttatcgttgagcaagaaatggaagatgtgacattgaactttgaatgtgggcgctttattgtggcacatattggttactatgtgacagaagtgctagatattaagaaagtgcatggtgcttggtatgccattttaagaggaggtacgcaacaatttagactgccggtatcttggcagcataaccatccttttgaaatttatcgttataaggacaatccatattcatttgaaaaagtttcaatttcgagacaggacacaacgttagtcggtcaattatgtacaccgaaagatgtctttgctagagaagtacagatagacgcaatcagtacaggcgacgttattgttttcaaatatgcaggtgcatacggatggtctatttcacatcacgatttcttaagccatccacatcctgaatttatttatttaacgcaaacaaaggaggatgaataactattgaatcatattcatgaacatttaaaattggtaccagtagataagattgatcttcacgaaacattcgaacctttaagattggaaaaaacgaaaagtagtattgaagcagatgattttatatgtcatcctattttagtgacagcgatgcaacatggtagatatatggttatagatggtgtgcatcggtatacaagtttgaaagcgttaggatgtaagaaagttccagtgcaagaaatccatgaaacacaatattcaattagtacatggcaacataaagttccatttggtgtgtggtgggaaacgttacaacaagaacatcgcttgccatggactactgagacaagacaagaagcgccatttattacgatgtgtcatggtgatacagaacaatatttgtatacgaaagatttaggcgaagcacattttcaagtatgggaaaaggttgtcgcaagttatagtggttgttgttctgtagagagaattgcacaaggtacatatccttgtctttctcaacaagatgtactcatgaagtatcagccattgagttataaggaaattgaagcggttgttcataaaggggaaactgtgccagcaggtgtgacacgctttaatatttcaggacgatgtcttaatcttcaagtaccactggcattacttaaacaagatgatgatgttgaacaactgcgtaattggaagcagtttttagcagataagtttgccaatatgagatgctatactgaaaaagtatacttggtggagcaatagttttactgtgatgttgagggaaatatgatgatttagcgtattgatagcgaaaatataataaaacaatatagtgtggagaacttttgatattttataaatattgaagttctccatttttgtattttgcatataaaaattaaataaaataaggtatattaaggtaaagtataaatattaaataaatggggaatagacatggaaaaaaatgtagaaaaatcattcataaagataggtttatattttcaaatagcttatatagtactcatggctataactttatgtgggtttgtaatttgctatggactaattttcggccttttctatttattatcaggtagcagagctgattatttaatagtaacaatagttatatcggcaataatttctatatttgtaattatactttcaatcgtacctgtcatcgtattggcatctgacttatttaaagaaaggatttcaaaaggtgtcatattaattgtattggctattattgctttagtattatgcaactttgtatctgcaatactctggtttgtttcagccatatctattttaggtagaaaaaaattagtagctgcagcagatactaccactattcaaaaaagtaaagggaacgcaaatcaagcatcacataaagacacgtgtaaaaaggaacttgatagtcaagacatgatggaacatcctgaggttaaaaatcccacgactaaaaaccttgaaggatttaacgaagaaatacataaagatgaagctacaactaaagttgtcagtgataacacggaaccgccgattgaatcaaaaggccatgtctcgaaaaaagattgatgacaaactaatcgagagacttaaaaaaataatattcaacataagaacttttaaaacgacatttaaacgcattgccaatcactaatggtagtgcgtttaactataccttaaatatctgaatattttgttaaatggagctacctttgttgtactattcaaatgaagaggagtaaaatgtaattaaaggaaagaaatttgaggagtgatctttatgacaaacaacaaagtagcattagtaactggcggagcacaagggattggttttaaaattgcagaacgtttagtggaagatggtttcaaagtagcagttgttgatttcaatgaagaaggggcaaaagcagctgcacttaaattatcaagtgatggtacaaaagctattgctatcaaagcagatgtatcaaaccgtgatgatgtatttaacgcagtaagacaaactgccgcgcaatttggcgatttccatgtcatggttaacaatgccggccttggaccaacaacaccaatcgatacaattactgaagaacagtttaaaacagtatatggcgtgaacgttgcaggtgtgctatggggtattcaagccgcacatgaacaatttaaaaaattcaatcatggcggtaaaattatcaatgcaacatctcaagcaggcgttgagggtaacccaggcttgtctttatattgcagtacaaaattcgcagtgcgaggtttaacacaagtagccgcacaagatttagcgtctgaaggtattactgtgaatgcattcgcacctggtatcgttcaaacaccaatgatggaaagtatcgcagtggcaacagccgaagaagcaggtaaacctgaagcatggggttgggaacaatttacaagtcagattgctttgggcagagtttctcaaccagaagatgtttcaaatgtagtgagcttcttagctggtaaagactctgattacattactggacaaacaattattgtagatggtggtatgagattccgttaataatcatgcattagcgataaataaatccttattgttaagtttaatcacttagcagtaaggattttttagtgcacttagaagggattgtattggtagaaaattaataagcgaagttcttaaatgagttatgatgtcacagtctaatgcatcagttgaaagcattactagtattaacacacccaagatattataaaacatcacaaaaacaccactatctaatttatctcaataaaaattcacaaagttatctcattttatttttataaataaaaaatatcgataaaaagcttacaatactttatgtttttatgatatatttttaatgtataaatgaggtggaagatttggaaagagttttgataactggtggggctggttttattgggtcgcatttagtagatgatttacaacaagattatgatgtttatgttctagataactatagaacaggtaaacgagaaaatattaaaagtttggctgacgatcatgtgtttgaattagatattcgtgaatatgatgcagttgaacaaatcatgaagacatatcaatttgattatgttattcatttagcagcattagttagtgttgctgagtcggttgagaaacctatcttatctcaagaaataaacgtcgtagcaacattaagattgttagaaatcattaaaaaatataatagtcatataaaacgttttatctttgcttcgtcagcagctgtttatggtgatcttcctgatttgcctaaaagtgatcaatcattaatcttaccattatcaccatatgcaatagataaatattacggcgaacggacgacattaaattattgctcgttatataacataccaacagcggttgttaaattttttaatgtatttgggccaagacaggatcctaagtcacaatattcaggtgttatttcaaagatgttcgattcatttgagcataacaagccatttacattttttggtgacggactgcaaactagagattttgtatatgtatatgatgttgttcaatctgtacgcttaattatggaacacaaagatgcaattggacacggttataacattggtacaggcacttttactaatttattagaggtttatcgtattattggtgaattatatggaaaatcagtcgagcatgaatttaaagaagcacgaaaaggagatattaagcattcttatgcagatatttctaacttaaaggcattaggatttgttcctaaatatacagtagaaacaggtttaaaggattactttaattttgaggtagataatattgaagaagttacagctaaagaagtggaaatgtcgtgaaaatgacattgaagctgtccataataataagggttatgcctatcaaagaaaattagatgcactcgaagaagtgagaaaaggctattacccaattaaacgtgcgattgacttagtattaagtatcgttttattatttttaacatttccgattatgttcatattcgccattgctatcgtcatagattcgccaggaaaccctatttatagtcaggttagagttgggaagatgggtaaattaattaaaatatacaaattacgttcgatgtgtaaaaacgcagagaaaaatggtgcgcaatgggctgataaagatgatgatcgtataacaaatgtcgggaagtttattcgtaaaacacgcattgatgaattaccacaactaattaatgttgttaaaggggaaatgagttttattggaccacgcccggaacgtccggaatttgtagaattatttagttcagaagtgataggtttcgagcaaagatgtcttgttacaccagggttaacaggacttgcgcaaattcaaggtggatatgacttaacaccgcaacaaaaactgaaatatgacatgaaatatatacataaaggtagtttaatgatggaactatatatatcaattagaacattgatggttgttattacaggggaaggctcaaggtagtcttaatttacttaataagttcaaataaaagttatattttaaagattgtgaccaattgttacagtataacgaggaatcccttgagacagtatcaaatggcattaagaaatatgtgccatcattgatttgcatggctataaatactattcatctgatgagatagccatgttaagaaattgaaagtatagcattaaaggggtttgtaacagttgaaaattatatattgtattactaaagcagacaatggtggtgcacaaacacatctcattcaactcgccaaccatttttgcgtacaccatgatgtttatgtcattgtaggcaatcatggaccaatgattgaacaactagatgcaagagttaatgtaattattctcgaacatttagtaggtccaattgactttaaacaagatattttagctgtcaaagtgttagcacagttattctcgaaaattaagcctgatgttatccatttacattcttccaaagctggaacggtcggacgaattgcgaagttcatttcgaaatcgaaagacacacgtgtagtttttactgcgcatggatgggcttttacagagggtgttaaaccagctaaaaaatttctatatctagttatcgaaaaattaatgtcatgtattacagatagcattatttgtgtttcagatttcgataaacagttagcgttaaaatatcgatttaatcgattgaaattaaccacaatacataatggtattgcagatgttcccgctgttaagcaaacgctaaaaagccaatcacataacaatattggcgaagtagttggaatgttgcctaataaacaagatttacagattaatgccccgacaaagcatcaatttgttatgattgcaagatttgcttatccaaaattgccacaaaatctaatcgcggcaatagagatattgaaattacataacagtaatcatgcgcattttacatttataggcgatggacctacattaaatgattgtcagcaacaagttgtacaagctgggttagaaaatgatgtcacatttttgggcaatgtcattaatgcgagtcatttattatcacaatacgatacgtttattttaataagtaagcatgaaggtttgccaattagcattatagaagctatggctacaggtttgcctgttatagccagtcatgttggcggtatttcagaattagtagctgataatggtatatgtatgatgaacaaccaacccgaaactattgctaaagtcctggaaaaatatttaatagacagtgattacatcaaaatgagtaatcaatctagaaaacgttatttagaatgttttactgaggaaaaaatgattaaagaagtggaagacgtttataatggaaaatcaacacaatagtaaattactaacattgttacttatcggtttagcggtttttattcagcaatcttcggttattgccggtgtgaatgtttctatagctgactttatcacattactaatattagtttatttactgtttttcgctaaccatttattaaaggcaaatcattttttacagtttttcattattttgtatacatatcgtatgattattacgctttgtttgctattttttgatgatttgatatttattacggttaaggaagttcttgcatctacagttaaatatgcatttgtagtcatttatttctatttagggatgatcatctttaagttaggtaatagcaaaaaagtgatcgttacctcttatattataagcagtgtgactataggtctattttgtattatagctggtttgaacaagtcccctttactaatgaaattgttatattttgatgaaatacgttcaaaaggattaatgaatgaccctaactatttcgcgatgacacagattattacattggtacttgcttacaagtatattcataattacatattcaaggtccttgcatgtggtattttgctatggtctttaactacaacggggtctaagactgcgtttatcatattaatcgtcttagccatttatttctttattaaaaagttatttagtagaaatgcggtaagtgttgtgagtatgttagtgattatgctgatattactttgttttaccttttataatatcaactactatttattccaattaagcgaccttgatgccgtaccgtcattagatcgaatggcgtctatttttgaagagggctttgcatcattaaatgatagtgggtctgagcgaagtgttgtatggataaatgccattttagtaattaaatatacactaggttttggtgtcggattagtggattatgtacatattggctcgcaaattaatggtattttacttgttgcccataatacatatttgcagatctttgcggaatggggcattttattcggtgcattatttatcatatttatgctttatttactgtttgaattatttagatttaacatttctgggaaaaatgtaacagcaattgttgtaatgttgacgatgctgatttactttttaacagtatcatttaataactcaagatatgtcgcttttattttaggaattatcgtctttattgttcaatatgaaaagatggaaagggatcgtaatgaagagtgattcactaaaagaaaatattatttatcaagggctataccaattgattagaacgatgacaccactgattacaatacccattatttcacgtgcatttggtcccagtggtgtgggtattgtttcattttctttcaatatcgtgcaatactttttgatgattgcaagtgttggcgttcagttatattttaatagagttatcgcgaagtctgttaacgacaaacggcaattgtctcagcagttttgggatatctttgtcagtaaattatttttagcgttaacagtttttgcgatgtatatggtcgtaattactatatttattgatgattactatcttattttcctactacaaggaatctatattataggtgcagcactcgatatttcatggttttatgctggaactgaaaagtttaaaattcctagcctcagtaatattgttgcgtctggtattgtattaagtgtagttgttatttttgtcaaagatcaatcagatttatcattgtatgtatttactattgctattgtgacggtattaaaccaattacctttgtttatctatttaaaacgatacattagctttgtttcggttaattggatacacgtctggcaattgtttcgttcgtcattagcatacttattaccaaatggacagctcaacttatatactagtatttcttgcgttgttcttggtttagtaggcacataccaacaagttggtatcttttctaacgcatttaatattttaacggtcgcaatcataatgattaatacatttgatcttgtaatgattccgcgtattaccaaaatgtctatccagcaatcacatagtttaactaaaacgttagctaataatatgaatattcaattgatattaacaatacctatggtctttggtttaattgcaattatgccatcattttatttatggttctttggtgaggaattcgcatcaactgtcccattgatgaccattttagcgatacttgtattaatcattcctttaaatatgttgataagcaggcaatatttattaatagtgaataaaataagattatataatgcgtcaattactattggtgcggtaatgaatttagtattatgtcttgttttgatatatttttatggaatttacggtgcggctattgcacgtttaattacagagtttatcttacttatttggcgatttgttgatattactaaaatcaatgtgaagttgaatattgtaagtacgattcaatgtgtcattgctgccgttatgatgtttattgtgcttggtgtggtcaatcattatttgccccctacaatgtacgctacgctgctattaattgcgattggtatagtagtttatcttttattaatgatgactatgaaaaatcaatacgtatggcaaatattgaggcatcttcgacataaaacaatttaagtatcggtaacgctatactttagaaatttaagattaagaagaaaaggcaatttcttattgaaaaatggaagttgtcttttttaattctctttaaaagcgggaaacaaaagcagttaaatgcctttttgcattcaatattaaatattatatcaatttcgaatatttaaattttatataattggatataacaaataaataataattattgcaaaacacacccgaaattaattattataaaagtatattcataaaaggaggaatatacttatggcatttaaattaccaaatttaccatatgcatatgatgcattggaaccatatatagatcaaagaacaatggagtttcatcacgacaaacatcacaatacgtacgtgacgaaattaaacgcaacagttgaaggaacagagttagagcatcaatcactagcggatatgattgctaacttagacaaggtaccggaagcgatgaggatgtcagtccgtaataatggcggtggtcattttaaccattcattattctgggaaatactatcacctaattctgaagaaaaaggtggcgtaatagatgacatcaaagcgcagtggggcactttagatgaatttaaaaatgaatttgcaaataaagcaacaacattatttggatcaggttggacttggttagttgttaatgatggaaaattagaaattgtgacaacgccaaaccaagataatccattaacagaaggcaaaacaccaatcttactatttgatgtttgggagcatgcctactatctgaaatatcaaaataaacgtccagactatatgactgcattttggaatattgttaactggaaaaaagttgatgaattataccaagcagcaaaataatataacttaatataattgaggtggagcatttacaaggtgttccacttttttgtacttaatatctttacttatttgtttttgtgtaatgggatagcacgtaaaagtggcaaaataataagataaatttcaactcgaaataccttattattgttgactataatgatgacctaaatgttatatacatcagacaacactattaattaatcaacatattgacattaaataaattgacaaaataagtaattattgtgaatctaaagtgaaatttttataaaaaattgtaacgattcaaaaattttgttgcatttcttttgtaatcatatgataatgtaaatgtaatcaaattgtaatataagggaaaagacaatgaaaaaattagcaacagtaggttctttaattgtaacaagcactttagtattctcaagtatgccttttcaaaatgcgcatgccgacacgacttcaatgaatgtgccgaataaacaaagccaaaatgtacaaaatcatcgcccttatggcggagtagtaccacaaggaatgacgcaagcacaatatactgaattagagaaaactttaccccaattaagcgctggcagtaatatgcaagactataatatgaaattgtatgatgcgacgcaaaatattgctgataaatacaatgtgataattacaactaatgtaggggtatttaaaccacatgctgttagagatatgaatggccatgcgttacctttaacaaaagatggcaatttttatcaaacgaatgtagatgcaaatggtgttaatcatggtggtagtgaaatggtgcaaaataaaacaggtcatatgagtcaacaagaccatatgaatcagaacacacacatgaaccaacagccacaaatacaacaaggtcatatgcaatcatcaaaccatcaaatgatgagtccaaaagcaaatatgcattcatcaaatcatcaaatgaaccaaagtaacaaaaaagttttaccagctgctggtgaaagtatgacatcaagtattcttactgcaagtattgccgcactactattagtatctgggttattcttagcatttagacgacgttcaacaaataaataaacataatacgattaataatagaaaaatcgtgtgattatctgagcgagcctaggacataaatcaatgtcctaggctcgctaatgttatattggcagtagttgactgaatgaaattgcgcttgtaacaagcttttccatttcttaccaactccctaaatagtcatcaaaaaatttcttatattttaataattttaataatccgattgtcttatacgtgtcagtgttaattcagatatttcctgtggaatataccacttattaatcataattggataaggtgtttgtgcgtacagtgtttcaataatcagccaacaatgtgtatcaccatcaaacacgtgactatgatttttgaagcggggcgctttggtaatagacatttttaaatctgattgatatgcattgctataaatcgtttgctcaacgaatgtcttcatgtcgtcttcgttttgtgtattcactttaaatgtgtcaatgacatttaacggtataaaggtaaagcaaaatgcatcagcttgcttagaatgattgtcctttttttgataatagcgttccattgcaatgacggcagaaggatggtttgcaaacaaatgatttgtatattcactttctaaatcaacacgataattaattgatgacatagatacgcgagctagcaatatttgatcaagtggatgcttaaattgatccatacttgaagcgtgttgggcatttgtttgtggaataacaaagtgtcccttccctcttgtactctctacgatgccatcttcggctaacaattttatagcttggcgcaaagtcatacgactgacatcaaagcgcgcacaaagttccttttcagtaggtaatgcatggccactcggatattttcctatttgaatttctttatataacgtattataaatcgttaaaaattttggttgtgtttgcgtcacgtagacaacctccataaagttacttaatcactctcatcatacaataatttttactcgaattggaaaaattataaaaattaaatatagataggctttgaaaattagttttatacaaggttagtagctgtaactgtaaaatgttcttaatattgtcaaaatgtaatgcttgaaagcgcttttaaaaaatattattatatacatgattagacaaatagacaaataactatacaaatattgggaggaatattttatgaaatcaacaccacacattaaaccaatgaatgacgtcgaaattgcagaaacggttctattgccaggagatccgttaagagctaagttcattgcagaaacttatttggatgatgtggaacagttcaatacagtgcgaaacatgtttggttttaccggaacatataaaggtaaaaaagtttctgtcatgggttcaggtatgggtatgccatctattggcatttactcttatgaattaattcatacatttggttgtaaaaaattaattcgcgttggctcttgtggcgcgatgcaagaaaacattgatttatatgatgtgattattgcacaaggtgcctctactgattcaaattacgttcaacaatatcaattaccaggtcattttgcgccaattgcttcttatcaattattagaaaaagcagttgaaacagcacgtgacaaaggtgtacgtcatcatgtaggtaatgtgttatcaagtgatattttctataacgcggatacaacagcgagtgaacgttggatgcgtatgggtattttaggtgtagaaatggaatcagctgcattatacatgaatgcaatttacgctggtgtcgaagcattaggtgtgttcacagtgagcgatcatttaattcatgaaacgtcaacaacacctgaggaaagggaacgtgcatttacagatatgattgaaattgcactgtcattggtgtagatgattatgaatgttgaatattctaaaataaagaaagcagtacctattttattattcttatttgtattcagtttggttatagacaactcatttaaattgatttctgtagccattgctgatgacttaaacatatctgtaacgacagtaagttggcaagcgacattagccggtttagtaattggtattggcgctgtagtatacgcttcattatctgatgccattagtatacgcacactatttatttatggcgtgatattaatcattatcggatcaattattggttacattttccaacatcaattcccattacttttagttggacgtattattcaaactgccggtttagctgctgcagagacattatatgtgatatatgttgcaaagtatctttctaaagaggaccagaagacttaccttggcttaagtacgagcagttattccttgtcattagttatcggtacattatcaggtggatttatttctacgtatttacactggacaaatatgtttttaattgcattaatcgtagtatttacgttgccattcctatttaaattattaccaaaagaaaataatacgaataaagctcatttagattttgttggcttaattctagtggcaactattgctacaacagtcatgctgtttattacgaactttaattggttatatatgattggtgccttaattgcgattatcgtttttgcgctatatattaaaaatgcgcaacgtccattagtaaataaatcatttttccaaaataaacgttatgcttcatttttatttatagtatttgtaatgtatgctatccaattgggttatatttttacgttcccattcataatggagcaaatttatcatctgcaactagacacaacatcactgttattagtaccgggttatatagtagcagtcattgttggtgcattaagtggtaaaatcggcgaatatctgaattcaaaacaagcgattatcacagcaattattttaatagcactgagcttgattttacctgcatttgcagtaggtaatcacatttcaatcttcgtcatttctatgatattctttgcaggtagctttgctttaatgtatgcacctttacttaacgaagccattaaaacaatagatcttaatatgacaggtgtggctattggtttttataatttaattattaatgtggcggtatctgtaggtattgcgattgctgcggctctaatcgattttaaagcattaaatttcccaggcaatgatgcattaagttcacatttcggtattattttaattattttaggtttaatgagtattgtcggattagttttattcgtcatcttaaatcgttggacacaatctgaaaaataaatagatataaattcgcgagatatattcgtatttatagtaaaattaaataaagagattatataacacgaggagtagtaagtatgaaatttgagaaatatatagatcacactttattgaagcctgagtcaacacgtacgcaaatcgatcaaatcatcgatgaagcgaaagcatacaattttaaatctgtatgtgtgaatccaacgcatgttaaatatgcagcagagcgactagctgattcagaggtgctcgtttgtacggtaataggattcccattaggtgcgtcgacaactgcaacgaaagcatttgaaacagaagatgcaattcaaaatggtgcagatgaaattgacatggtcatcaacatcggcgcattaaaagatggacgttttgatgatgtacaacaagacattgaagcagtggttaaagctgcgaaaggtcacacagtaaaagtgattattgagacggtattgttggaccatgacgaaattgtaaaagcgagtgaattaacaaaagcggctggtgcggacttcgttaaaacttcaacaggttttgcaggtggcggtgcgactgcagaagacgttaaattaatgaaagatacagtaggtgctgatgtagaagtaaaagcatcaggtggcgtacgtaatttagaagatttcaataaaatggttgaagcaggtgcgacacgtattggtgcgagcgcaggcgttcaaattatgcaaggtttagaagcagattcagattactaatatatataaaatttgggagtgatagctatgacaagaccatttaatcgtgtacatttaatcgtaatggattcagtaggtattggtgaagcgccagacgcagctgattttaaagatgaaggttcacatactttaagacataccttagaaggtttcgatcaaactttaccaaaccttgaaaagttaggtctagggaacatcgataaattaccagtagtaaatgcagttgaacaaccagaagcatactatactaaattgagtgaagcttcagttggtaaagatacaatgactggtcactgggaaattatgggattaaatattatgcaaccttttaaagtataccctaatggattccctgaagagttaattcaacaaattgaagaaatgacaggtcgtaaagttgttgctaacaaaccggcatcgggtacgcaaattatcgatgagtggggcgagcaccaaatgaaaactggtgacttaattgtttatacaagtgcagacccagtattgcaaattgctgcacatgaagacattatcccattagaagagttatatgatatttgtgaaaaggttcgtgagttgacaaaagaccctaaatatttaattggtcgtattatcgcacgtccatatgttggtgaaccaggaaactttacacgtacatctaatcgacatgactatgcgttaaaaccatttggtaaaactgtcttagatcatttgaaagacggtggttatgatgttattgccatcggtaaaattaatgacatttatgatggtgaaggtgtaacagaagcggttcgtacgaagagtaacatggacggtatggatcaattgatgaaaattgttaagaaagatttcacaggtattagcttcttaaacttagtagactttgatgcattatacggtcatcgtcgtgataaaccaggttatgcacaagcaattaaagatttcgatgatcgcttgccagaactgtttagcaacttaaaagaagacgatttagtaattattacagcagaccatggtaatgacccgacagcgccaggtacggaccatacgagagaatatatcccagtaattatgtacagtccgaaatttaaaggtggtcatgcactagaaagtgatactacattcagttctatcggtgcaactatagcagataatttcaacgtaacattaccagagttcggtaaaagttatttaaaggaattgaaatagaataaatttagatattataaaaacagcagtgaagttaactataacaatagttttcttcactgctgtttttattataatagagaaacgtgacggtaggacctcttatttaggagtatcctgatttaatgttaaacaatacgttttcggattgaaccggaaattaaatcgacaattgcgaccattagtactaaaccgattaatataatacctacacggtcccaagaacgtgtttgaatggcaaatatgagtggtgtcccgataccaccagccccaattagccccagtatagaagctgaacgtaagtttagttcaaagcgataaagtatgagtgatagaaaggcaggcataatttgtggtatgactgcaaatacgagtgttttaatcttattcgcaccactggcctttaatgattctacagcactgaaatctagaccttcaatatcttcagctaaaagtttcccaagcatacctacagaatggatacctaaagctaatacacctgaaaatgaacctgggccaacagctttgataaatataagtgccattacaatttctgggaagacacgtataacacttaaaataaatttgctaacacctgaaaccgggcgtaactttaccatattatttgcacctaaaaatgctaatggaatacagataattgcggcgatgaaagtacctacaacggctatcgcaaaggtttcaagtaaaccacgtaataagtcttcgccatctggtatatagatatagctgatgtcaggatggaataatccgctgaatatggattttaagatttctaatgatttacttttaagttctaaacttggtacacctgcaaatgcccagatgataatagctaagacgacaattgcaataagccatcttttaatcaattttcgtttgtgtgcttttgtgtgaacattatattttgctatttcctgtgtcatgcgagatgtgccctcactttcgtactgatgtaatcaatgacgacgacgataactaaagtaaataaaataatcgttgctgtttttggatattgaaataaaccaagtgtttgatcataaaacaatccaataccgccagcgccgactaatccaagcacagctgaagctcgtatatttacttcaaatgcatataatacgtatgacataaatgacgatatggcttgtggtacaacaccgaaaacaatccattttattttattagcgccaacagccgtcattgcttccattggacctggatctatcgtttccaatgattcatataataattttccaataatacagatagttaaaataaacaatgctaatatccctggaatttgaccgattccaaatacagccacaaagattgctgctaataacaaatctggaatagtacgaactatatttaaaataaagcgcgagggtattgaaatccacttttgatgaacgatattgctagcacataataacgcaattggtattgaaacgatgctacctaatactgtacttacgatagccattcgaatggtatctaacattggcgttgtaatttgttgtaaatactcgaaatcaggtggaatcatttgtttgaatagatcacctatttgaggtattcctatcattaaatctccaaaattaaaccccgtataaatgaagctccaaatgataagcacaatgattaacatgaaggtaaaactcgtttttaaagaaacctttttctttaaaagggagtcatactttgtaggtatttctaaaggcatgttagttcactcctagcttttcatcttctttaattgtacgtccatatatttcactaaatacgtcatctgttgcttcagatgcaggaccatcatagacaacttcaccatcacgtaaaccaatgatgcgtgtgccatattcttttgccaagtcaacaaaatgtaaattaattaaaattgtgatgcctaattcttggttgatttttcttaaatcatccataacctgtttcgttgttaatgggtctaatgaagcaactggttcatctgcaagaataatttcggattcttggcatagcgcacgtgcaatagatatacgttgttgttggccacctgataattcatcagagcgttgattatatttatctaagatattgacgcgttctagtgcatccattgctttaattttgtcttcttttgggaataaacctaataccattttccaagtagggtgataacctacacgtccacttagtacatttcgtaatacacttgaccgtttaactaaattaaaatgttggaaaatcatacctatatttcggcgcatttctaataatgctttaccatgggctttagtgatggatttgccttggatgaaaatttcacctgacgtgatatcatgcaaacgatttacagatcttaataacgtggatttcccagcaccagatagtccgacaataactgcaaattcacctttttcaatatttaagttaatatttttcaagcctacatgaccgttaggatagactttactgacgtttttaaattcgatttgactcatgtttgacacctttctttaataaagaaaagccaaggtaaactgaaatatcatagacattgggtttctgtgtacaaatggtttcaaatgtacagcgacacctttctatatctgtttcagtttagcgcctagcttttcaatatttatctagaatatatctattgaacgaaagcttttaataccaaattcgataatgattatttcatatctttaactaatttttcgtactctcttacaatgtcgaaatttgaatctttcgtttctgtgtatccttcatgtgaataaacttcgctaataattttgtgaccttcttttgatttagcaatgtctataaaagcttttttcaatttttcttggaaatctttatccatatctggtcttacagaaattgtgtcattcggaatagcttgtgttaattttaaaattcgtgtgtctttaaatacatttggttggtcttttttcacagtattacgtgcatcgttaaatacagccgcagcatctacatctccatttaataatgagataactgcttggtcatgacctttaacattcacaattttcatatctttagttgcattaatacctgcttcgttttttaacatcgcaagtgggaatgtatatccagcagttgatgttacatcttgtaaggcaattttcttaccttttaaatctttcaagcttttaatttttgagtcttttttaacaagaatttctgatttataactatctacaagttctttacttgctgaaccatcttcttttacaccaaaacgttgtgcttgtaataataaatcagctgctttttgatcatgtgctaatgtgtatgccgttggtggtaagaaaccaacatcaacttttttagacttcatagcttcaacaattgtattgtagttagttgatacagacactttaactggaattcctaattctttagatagtaatttttctaatggttttgctttagcctctaatgttccagcattttgcgaaggtacaaattgtactgttaattctttaggtttgtatcctcctgatttagaatccgaatcattactagcgttcttttgattatctaaagaacttgagtttccacatgctgctgcaaaaacaatgactgctaacattaatacaaataaatacttaaaatttttcatttgataactgtccccttcacattcttaatcgtgtaatatgtatgcaatgaaattacacttatagcgtaccacatttaaatgtgaaaaagtattttataaaaatgaattttaataactttctttaagagtttgataagattttgtaaacttttcgttaaattgctcatatgcaacgaatttttatcctataattcaagaacaaatttattttaaaaggagcctcacaaaatgaaaaaaatatataagtcattaactgtctctgcaattgttgcaacggtatcattaagtgctttaccgcaatctttagctataacgcatgaatcgcaacctacaaagcaacagcgaacggtattattcgatcgttctcatggtcaaacagctggtgctgcagattgggttagtgatggtgcattttcagattatgcggattcaatacaaaaacaaggttatgacgttaaagctattgatggtcattcgaacataacagaagcaagtttgaaaagttccaaaatatttgtaattcctgaggctaacattcctttcaaagaatcagaacaggcagcaattgttaactatgtgaaacaaggtggcaatgttgtctttatttcagatcattacaatgctgaccgaaatttaaatcgtattgattcatcggaggcaatgaatggttatcgacgtggagcatatgaagatatgtcgaaaggtatgaatgcagaagaaaaaagctctactgcaatgcaaggtgtgaaaagttcagattggttatctacaaactttggcgtacgttttcgatataatgcactaggtgatttaaatacgagcaatattgtttcttcaaaagaaagtttcggtattactgaaggtgtgaaatctgtctctatgcatgccggatcgacattagcaattactaatccagagaaagcaaaaggtattgtgtatacaccagaacaattgccagcgaaaagtaaatggtcacatgctgtagatcaaggtatttataatggtggcggtaaagcagaaggcccctatgtagcaatttctaaagttggaaaaggtaaagcagcatttatcggtgattcatcacttgtggaagatagttcgcccaaatatgtaagagaagataatggagaaaagaagaaaacatatgatggttttaaagaacaagacaacggtaagctattaaataatataacggcttggatgtctaaagatagtgatgggaaatcacttaaggcgagtggactaacattagatacaaagactaagttgcttgattttgaacgaccagagcgttcaactgagcctgaaaaagagccatggtcacaaccgccgagtggttataaatggtatgacccaacaacatttaaagcaggtagttatggcagtgaaaaaggcgcggatcctcagccaaacacaccagatgatcatacgccaccaaatcagaacgtaaaaatatcatttgatatcccgcaaaatgtttctgtaaatgagccatttgaagtgacaatacatttaaaaggatttgaagcaaatcaaacacttgaaaatcttagagttggtatttacaaagaaggcggacgtcaaatcggacaattttcaagtaaagataacgattataacccaccaggttacagtactttgccaacagttaaagcagatgaaaacggaaatgctacaattaagatcaatgctaaagtacttgaaagtatggaaggttcaaagattcgtttaaaactcggtgacaaaaccttgattacaacagacttcaaataaatatataatagaaataagaaagatgtttgtgattgaaggagtgagtgaggatgtcaaacatagcattttatgtcgtgagcgacgtacatggttatattttcccaacagattttacgagtagaaatcaatatcaacctatgggattgttactagcgaatcatgttatagaacaagacagaaggcagtatgaccaaagttttaaaatagataatggtgattttttgcaagggtcaccattttgtaattacttaatcgcgcatagcggcagtagccagcctttagttgatttttataatcaaatggcattcgactttggtacgcttggtaatcatgaatttaattatggattgccatacttaaaagacactttacgcagactcaattatccagttttgtgcgctaatatttatgaaaatgatagtacattgactgataacggtgtgcagtattttcaggttggagatcaaacggttggtgtgataggtttaacgacacaatttattccccattgggaacaaccagagcatattcagtcacttacgtttcatagtgcttttgaaacacttcaacaacacttacctgaaatgaagcgacatgcagatatcattgtggtttgttaccatggtggatttgaaaaggatttagaaaatggtacgccgaccgaagtattaacgggtgaaaatgaaggatatgccatgttagaagcgttttctaaagatatagatatctttattacgggtcaccaacatcgacaaattgctgaaagatttaagcaaacggctgtgattcaacctggtacgagaggtacaactgtaggcaaagttgtcttgagtactgatgaatatgaaaatgtatccgttgaatcatgtgaattacttcctgttatagatgattccacatttactattgatgaagatgaccaacatttacgaaagcagttagaggactggttagattacgaaattactacattgccatatgatatgacgattaatcatgcatttgaggcacgtgtggcaccgcatccttttactaattttatgaattacgctttattagaaaaaagtgacgcagatgttgcctgtacagctttgtttgattctgctagtggtttcaagcaagtcgtgacgatgcgagatgttattaacaattacccatttccaaatacatttaaagttttagctgtaagtggtgccaaacttaaagaagccattgaacgatcagcagaatattttgacgtgcaaaatgatgaagtaagtgtgagcgcagacttccttggacccaaaccacaacactttaattatgatatatatggtggcgtaagttataccattcatgttggaagaccaaagggacaacgtgtgagcaatatgatgattcaaggtcacgcagttgatttaaagcagacatatacaatttgtgtaaataattatcgtgcagttggcggtggtcagtatgatatgtttatcgacgcgccagttgtgaaagatattcaagttgaaggcgcacaattacttattgattttttatcaaataataatttgatgcgtatcccgcaagttgttgattttaaagttgaaaagtgacggatatatgaaaaacttacttgattttaatcgggtaagtttttgtttttgtttaaactaaccactcttaaacgtcaatatactttaagaaaaatgttgattttacaaaaaatgaggcttatattttatataacttaatattatgaagtgattaatttggaaacaattaaacaagaagtaagagaatctattgttaaaggaattatcgcgggatataaggactatgttaatgagagaaatgaagtcaagaaacgtatggtgattagtgatgcctatgcctttactaaatctaatcatattgaaagtcaagttgctaagcatttggaaaattttgttaagtatattaaagaaaatgctggaccatcatggaagtatttaaagtttatatttaataaagatgaagagaaaaataatatcatgtttatattgaaaaatgaagattactttgatgaaaaaaatgtaagcgtagggaagagtttagttgctgataaaaatccaaaaagtaaaaactacctagaggtacttatggctaagaatagggacattaattttggtactgttggagaagattttgaaattgggcatcaaatgactgcagatagtatattatttaatataaaagaaggcagtaatagagatattaattcttattttttaattattacatatcgtattgataaagaatcaaagcaattagctgcaatcaaacaatggttaccaaatccagaaacaaattctgcaattatggttgatgatttgacagagttaatagaaaaagtaatagtagaaagagaagattatcatattgacgaagaagagttagaagtacttaaaaacgatggagagttagaactcatagatgtggaacatgcatttggtatcagtatcgatgaaggtaacgatatgattgaaagtgaaaggtgaagttaatgtttattggcaagaatttagaatacgtgagaaagcttaatgctctaagtagaaaagaattatcagaaaaaataaatgtgagtgaacaagcaatttggcaatatgaaacaaaaaatatgatgccagaaattagtaaaatttatgatatgacatctatttttaatgttaaatctagctactttattagcgagcagcccgaagagctcctaataaattctgtcgataaacatagtatagcttttagagcaaaaaattataaagtatctacgaaactattaaataagcaatattatcaagcaatgtatttatctaatttaactagctacttattttcttttgtaacgataccggataatattattttatctttaataaataatttagatgaattgttgaatggcaatttagaatcactaaataaaaaagaaagcataaaagaaattgctaaagttgtgagggctaaaattcttcaagatgaaagcaacgaagcactattatttatgcttgaaaaagcgggtatagttatatacgaaaagcgaattaatgatagcatagacgcatatagtttttggagtaaagatcagacaccttttattatactgggtacaaataggggggtagcagttagaaggaattttgatcttgcacatgagctgggacatctcgttctacatcgtcatattcaattcgacttattatctcctgaagaatataagacaattgaacatgaggcagatattttcgcctctgaatttttactacctgaagaagcgtttaaaaaagactttgatcaaatgaccaaaaaatcaaatcctgattatttagctgtattgaaagaaaaatggtatgtttctatacaagcaattgcaatgagagcttattatctaggcctaatgtctagtactcagtacagatatttttgggcatcattaaataaaaaaggctataaaagtaaagagcctttagacgacgtgattgaaatgtcacgtcctgtcaaaatgaatagtttattaaagttgtattttgatagaaatatactgacaccacaaaaattattgaattatttaaaagtcgatgaaacatttttgaatcatctagcaggtattaatttaaaactctttaaggattatgttaatgaaaatagagaatataatataacgaatctatataaataaggcaccaatatttaaaactcgagctgaaaagatcatcatttcagttcgagtttttttgtgtaacatctgttgataggtagcgacaaggaccttttaatgttgtgttttgtgcgatataacaagctttttaggctattaaagaatattcagaattaaatataaaattatgaataaattatgtcattgaaaaaattatgattataaaatcattctaaaaacaccgaaataacaatgatttcatgaaaacatttattttaaaatttgatatttgttcaaataatattcgaaattaaacttttttgtatagaattttctttatatcctgagagacatgtactataatgtttgtgaaataattcacaaagtataaaggagtggttgtatatgttaactatacctgaaaaagaaaatcgtggatcgaaagaacaagaagtggcaattatgattgatgctctagctgacaaagggaaaaaagcattagaagcattatctaaaaagtcacaagaagaaattgatcatattgttcatcaaatgagcttagcagctgttgatcaacatatggtgctagcaaaattagcacatgaagaaactggaagaggtatatacgaagataaagcgattaaaaatttatacgcttctgaatatatatggaattcaataaaagacaataagacagtagggattattggtgaagataaagaaaaaggattaacgtatgtagcggaaccaattggtgttatttgtggtgttacgccaacaacaaatcctacgtcgacaactatttttaaagcgatgattgcaattaagacaggaaatccaatcatttttgcattccatccaagtgcacaagaatcgtcgaagcgtgcagcagaagttgtattagaagcggcaatgaaggcaggtgcacctaaagatattattcagtggattgaagtgccttctatcgaagcaacaaaacaattaatgaatcacaaaggtattgcattagttctagcaacaggtggttcgggcatggttaagtctgcatattcaactggcaaaccggcattaggtgtgggaccaggtaacgtgccgtcttacattgaaaaaacagcacacattaaacgtgcagtaaatgatatcattggttcaaaaacatttgataatggtatgatttgtgcttctgaacaagttgtagtcattgataaagaaatttataaagatgttactaatgaatttaaagcacatcaagcatactttgttaaaaaagatgaattacaacgcttagaaaatgcaattatgaatgaacaaaaaacaggtattaagcctgatattgtcggtaaatctgcagttgaaatagctgaattagcaggtatacctgtccccgaaaatacaaaacttatcatagccgaaattagcggtgtaggttcagactatccgttatctcgtgaaaaattatctccagtattagccttagtaaaagcccaatctacaaaacaagcatttcaaatttgtgaagacacactacattttggtggattaggacacacagccgttatccatacagaagatgaaacattacaaaaagattttggactaagaatgaaagcttgtcgtgtacttgtaaatacaccatcagcggttggaggtattggtgatatgtataacgaattgattccgtctttaacattaggttgtggttcgtacggtagaaactcaatttcacataatgttagtgcgacagatttattaaacattaaaacgattgctaaacgacgtaataatactcaaattttcaaggtgcctgctcaaatttattttgaagaaaatgcaatcatgagtctaacaacaatggacaagattgaaaaagtgatgattgtctgtgaccctggtatggtagaattcggttatacaaaaacagttgagaatgtattaagacaaagaacggaacagcctcaaattaaaatatttagcgaagtcgaaccgaacccatcaactaatacagtatataaaggtctggaaatgatggttgatttccaaccagatacaatcattgcacttggtggtggttcagcgatggatgctgcaaaagcaatgtggatgttctttgaacaccctgagacatcattcttcggtgctaaacaaaagttcctagacatcggtaaacgtacttataaaataggcatgcctgaaaatgcgacgttcatttgtatccctacgacatcaggtacaggttcagaagtaacaccatttgcagttatcacagatagtgaaacaaatgtaaaatatccgttggctgattttgctttaacacctgacgttgcaattattgaccctcaatttgtgatgagtgtgccaaaaagcgttacagcagatacaggaatggatgtactaacgcatgcaatggaatcatatgtatctgtaatggcttcagactatacaagaggtttgagtctacaagcgattaaattgacgttcgaatatttaaaatcatctgttgaaaagggtgataaagtttcaagagagaaaatgcataacgcatcaactttggctggtatggcatttgcaaatgcattcttaggcattgcacactcaattgcacataaaattggtggcgaatatggtattccgcatggtagagcgaatgcgatattactaccgcatattatccgttataatgccaaagacccgcaaaaacatgcattattccctaaatatgagttcttcagagcagatacagattatgcagatattgccaaattcttaggattaaaagggaatacgacagaagcactcgtagaatcattagctaaagctgtctacgaattaggtcaatcagtcggaattgaaatgaatttgaaatcacaaggtgtgtctgaagaagaattaaatgaatcaattgatagaatggcagagctcgcatttgaagatcaatgtacaactgctaatcctaaagaagcactaatcagtgaaatcaaagatatcattcaaacatcatatgattataagcaataatctatctgataataatcatataactcacctgaaattacaaaagtaaaaaatgccacataaactttaagtcgataatcattttacggttatcggcttttatttattgccaaatcttcagagatacaaactagacaatcatttttttaaataaagaaaatattaagattgatactcatttcgcaaaatattactactttagagtataattatttttaatttcatataaatgaatatgcgtaaataatgcggtttaaaagtaattaattgtttaaacgatatgtaatatgtaaatactatatatataataccaattttaatgaaaatttttaagggaggtaaataatggaaagtacattagaattaacaaaaattaaagaagtattacaaaaaaacttgaagattttaattattttaccgctattatttttaattattagcgctattgttacatttttcgtcttatcacctaaatatcaagctaatactcaaatcttagtgaatcaaactaagggtgacaatcctcagtttatggcacaagaggttcaaagtaatattcaacttgtaaatacgtataaagaaattgttaaaagtcctagaattttagatgaggtgtcaaaggacttaaatgataagtattcaccatctaaattgtcgagtatgttgacaattacaaaccaagaaaatacgcaacttatcaacatccaagttaaaagtggtcataaacaagattcggaaaaaattgcgaatagcttcgctaaagttacaagtaaacaaattccgaagattatgagtgtggataacgtatcaattttatctaaagcagacggtacagcagttaaagtcgcaccaaaaactgtagtgaatctaatcggtgcattctttttaggattagttgtcgcgcttatatatatcttcttcaaagtaattttcgataagcgaattaaagatgaagaagatgtagagaaagaattaggattgcctgtattgggttcaattcaaaaatttaattaaggatggttgctacttatgtcaaaaaaggaaaatacgacaacaacactatttgtatatgaaaaaccaaaatcaacaattagtgaaaagtttcgaggtatacgttcaaacatcatgttttcaaaagcaaatggtgaagtaaagcgcttattggttacttctgaaaagcctggtgcaggtaaaagtacagttgtatcgaatgtagcgattacttatgcacaagcaggctataagacattagttattgatggcgatatgcgtaagccaacacaaaactatatttttaatgagcaaaataataatggactatcaagcttaatcattggtcgaacgactatgtcagaagcaattacgtcgacagaaattgaaaatttagatttgctaacagctggccctgtacctccaaatccatctgagttaattgggtctgaaaggttcaaagaattagttgatctgtttaataaacgttacgacattattattgtcgatacaccgccagttaatactgtgactgatgcacaactatatgcgcgtgctattaaagatagtctgttagtaattgatagtgaaaaaaatgataaaaatgaagttaaaaaagcaaaagcacttatggaaaaagcaggcagtaacattctaggtgtcattttgaacaagacaaaggtcgataaatcttctagttattatcactattatggagatgaataagtatgattgatattcataaccatatattgcctaatatcgatgacggtccgacaaatgaaacagagatgatggatcttttaaaacaagcgacaacacaaggtgttacagaaatcattgtaacatcacatcacttacatcctcgatataccacacctatagaaaaagtgaaatcatgtttaaaccatattgaaagcttagaggaagtacaagcactaaatctaaagttttattatggtcaggaaataagaattaccgatcaaatccttaatgatattgatcgaaaagttattaccggtattaatgattcacgctatttactaatagaatttccatcaaatgaagttccacactatactgatcaattatttttcgaattacagagtaaaggctttgtaccgattattgcacatccagagcggaataaagcaataagtcaaaaccttgacatactatacgatttaattaacaaaggtgctttaagtcaagtgacaacggcgtcattagcgggtatttccggtaaaaaaattagaaaattagcaattcaaatgattgaaaacaatctgacacatttcatcggttcagatgcgcataacacagaaatcagaccgttcttaatgaaagacttatttaatgataagaaattacgtgattattatgaagatatgaacggatttattagtaatgcgaagttagttgttgatgataaaaaaattcctaaacgaatgccacaacaagattataaacagaaaagatggtttgggttataaacagcaaatgaggggttttatggcacatttatctgtgaaattgcggcttttaatactagcattaatcgattcactgatagtgacattttcagtattcgtaagttattacattttagaaccgtatttcaaaacatattctgtcaaattattaatattggcagctatatcactattcatatcgcatcatatttcagcatttatttttaatatgtatcatcgagcgtgggaatatgccagtgtgagtgaattgattttaattgttaaagctgtgacgacatctatcgttattacgatggtggtcgtgacaattgttacaggcaatagaccgttttttagattgtatttaattacttggatgatgcacttgattttaataggtggctcaaggttattttggcgtatttatcggaaataccttggaggtaagtcatttaataagaagccaactttagttgttggtgctggtcaagcaggttcaatgctgattagacaaatgttgaaaagtgacgaaatgaaacttgaaccggtattagcagtcgatgatgacgaacataaacgcaatatcacaattactgagggtgtaaaagtccaaggtaaaattgcggatattccagaactagtgaggaaatataagattaaaaaaatcatcattgcaattccaactattggtcaagagcgtttgaaagaaattaataatatttgccatatggatggcgttgagttattgaaaatgccaaatatagaagacgtcatgtctggtgagttagaagtgaatcaactgaaaaaagttgaagtagaagatttactaggcagagatcctgttgaattagatatggatatgatatcaaatgaattgacgaataaaactattttagttacgggtgcaggtggttcaataggatcagaaatttgtagacaagtttgtaatttctatccagaacgtattattctacttggccatggtgaaaacagtatttatttaatcaatcgtgaattgcgaaatcgcttcggaaaaaatgttgatatcgttcctattatagcggatgtgcaaaatagagcgcgtatgtttgaaattatggaaacgtataaaccatacgcagtttatcatgcagcagcacacaagcacgtgccgttaatggaagacaaccctgaagaagcagtacataataatattttaggtacgaaaaatactgctgaagctgctaaaaatgcagaggtaaagaaattcgttatgatttctacggataaagccgttaatccgcctaatgtcatgggagcttcaaagcgaattgcagaaatgattattcaaagtttaaatgatgaaacgcatcgaacaaattttgttgcagtgagatttggtaatgtacttggatcgagaggatctgtgattccacttttcaaaagtcaaattgaagaaggtgggccagttactgtgacacatcctgaaatgacacgttactttatgacaattcctgaagcttctagactagttttgcaggcaggggcattagcagaaggtggcgaagtatttgtgctagatatgggagaaccagtgaaaattgtagatttggcacgtaatttaattaagctaagtggtaaaaaagaagacgacatacgcattacttatacagggattagacccggcgaaaaaatgtttgaagagcttatgaataaagatgaggttcatcctgaacaagtatttgaaaaaatttatcgtggcaaagtacaacatatgaaatgtaatgaagttgaagcgattattcaagacatcgtcaatgactttagtaaagaaaaaattattaactatgccaatggcaaaaagggagataattatgttcgatgacaaaattttattaattactgggggcacaggatcattcggtaatgctgttatgaaacggtttttagattctaatattaaagaaattcgtattttttcacgcgatgagaaaaaacaagatgacattcgaaaaaaatataataattcaaaattaaagttctacattggtgatgtgcgtgatagtcaaagtgtagaaacagcaatgcgagatgttgattacgtattccatgcagcagctttaaaacaagtgccgtcatgtgaattctttccagttgaggcagtgaagacaaatattattggtacagaaaatgtcttacaaagtgctattcatcaaaatgttaaaaaagtcatatgtttatctacagataaggcagcgtatcctattaatgctatgggtatttcaaaagcaatgatggaaaaagtattcgtagccaaatcaagaaatattcgtagtgaacaaacgcttatttgtggtacaagatacggtaatgtgatggcttcaagaggatcagtaatacctttgtttatcgacaaaatcaaagctggagaacctttaacgattacagatcctgatatgacaagatttttaatgagcttagaagatgcggtagaactagttgttcatgcatttaagcatgcagagacaggagatattatggttcaaaaagcaccaagctcaacggtaggggatcttgcgaccgcattattagaattgtttgaagctgataatgcaattgaaatcattggtacgcgacatggagagaaaaaagcagaaacattgttgacgagagaagaatacgcacaatgtgaagatatgggtgattattttagagtgccggcagactccagagatttaaattatagtaattatgttgaaaccggtaacgaaaagattacgcaatcttatgaatataactccgataatacacatattttaacggtggaagagataaaagaaaaacttttaacactagaatatgttagaaacgaattgaatgattataaagcttcaatgagataggagagattgacgttgaatattgtaattacaggagcaaaaggttttgtaggaaaaaacttgaaagcagatttaacatcaacgacagatcatcatattttcgaagtacatcgacaaactaaagaggaagaattagagtcagcattgttgaaagcagactttatcgtgcatttagcgggtgttaatcgacctgaacatgacaaagaattcagcttaggaaacgtgagttatttagatcatgtacttgatatattaactagaaatacgaaaaagccagcgatattattatcgtcttcaatacaagcaacacaagataatccttatggtgagagtaagttgcaaggggaacagctattaagagagtatgccgaagagtatggcaatacggtttatatttatcgctggccaaatttattcggcaagtggtgtaagccgaattataactcagtgatagcaacattttgttacaaaattgcacgtaacgaagagattcaagttaatgatcggaatgttgaactaacgctaaactacgtggatgatatcgtcgctgaaataaagcgtgctattgaaggaactccaacgattgaaaatggtgtacctacagtaccaaacgtatttaaagtgacattgggagaaattgtagatttattatacaagttcaaacagtcacgtctcgatcgaacattgccgaaattagataacttgtttgaaaaagatttgtatagtacgtatttaagctatctacctagtacagactttagttatcccttacttatgaatgtggatgataggggttcttttacagaatttataaaaacaccggatcgtggtcaagtttctgtaaatatttctaaaccaggtattactaaaggtaatcactggcaccatactaaaaacgaaaaatttctagtcgtatcaggtaaaggggtaattcgttttagacatgttaatgatgatgaaatcattgaatattacgtttctggcgataaattagaagttgtagacataccagtaggatacacacataatattgaaaatttaggcgacacagatatggtaactattatgtgggtgaatgaaatgtttgatccaaatcagccagatacgtatttcttggaggtatagcgcatggaaaaactgaaattaatgacaatagttggtacaaggcctgaaatcattcgtttatcatcaacgattaaagcatgtgatcaatattttaatcagatattagtacacactggtcaaaattatgattatacattgaatcaaattttctttgatgatttggaattaagacaaccggaccactacttagaggcagttggaagtaaccttggagaaacgatggggaatattattgcgaagacatatgacgttttattacgcgaacaaccagatgcacttttaattcttggtgatacaaatagttgtttagcagcagtatctgctaaacgattaaagattcctgtgttccacatggaagcgggtaatagatgctttgatcagaatgtacctgaagaaatcaatcgtaaaattgttgaccatgtcagtgatgtgaatctaccttatacagaacatagcagacggtatttattagatgaaggcttcaataaagcgaatatctttgtgacaggatcaccgatgacagaagtgatagaagcgcatcgagataaaattaatcacagtgacgttttaaataaactaggattagaaccgcaacaatacattttagtatctgcgcatagagaagagaatatcgataatgaaaagaattttaaatcattaatgaatgcgataaatgatattgccaaaaagtataaaatgcctgtgatttattcaacgcatccaagaagttggaagaaaattgaagaaagtaaatttgaatttgatccattagttaaacagttaaagccatttggtttctttgattataatgcattgcaaaaagatgcatttgttgtgctatcagatagtggaacattgtcagaagagtcgtctattttgaagttccctggtgtccttattcgaacttccacagaaagaccggaagtactagataaaggtacggttattgtaggtggtattacctataacaatctaatccaatccgttgaactagcaagagagatgcaaaacaataacgaaccgatgattgatgctattgattataaagacactaacgtttcgacaaaggtagttaaaattattcaaagctataaagatattatcaatcgaaatacttggaggaaatgacgatgaggatagcgattgaaaagataattggtttgctgaaaaaccagtcctctaaagaatcgaatgttaagattcatcgcttggcgtatattacaaactcaaaatttgatggcaataactatatagatagatggtgtaaaatcaggaattctcacattggtgaatacagttatattggatttggtagtgattttaataatgtagaagtaggaagatattgttcgatatcttcggatgtaaaaattgggttaggaaaacatcctacacacttttttagctcatcaccgattttttattctaataataatccatttaacataaagcaaaagtttatagactttaatgaccaaccaagccgtacaacaattaaaaatgatgtgtggattggtgcaaatgtaattattatggatggattaacaataaatactggtgcagtcatagcagccggctcagttgttactaaaaatgtaggagcatatgaggttgttggtggggttcctgcaaaagtgattaagaagcgatttgacaataaaacaattgaaaaacttttggaaagcaagtggtgggagaaaacgcctgacaaactaaaaggattttcggttgaatatttaaataaaaaggatacttaatgatatgagaattttaaatattgtatcgagtaatattgttcaagacccaagggtacttaaacaaatagaaacaattaaaggcgttacgaatgattataaaattgttggaatgaataattcacaagctactaataggcgattggaaaatttagattgtaattatcgtttgttaggtagcaaggtagatcccaaaaatattctttctaaattaattaagcgtataagatttgcaacaggtgttatccgagaaattaaagcttttaaacctgacgtgattcatgcaaatgatttcgacgtattattaatggtctatttaagcaattataaaaaagctaatattgtttatgatgcgcatgaaatatatgcgaaaaatgcctttattaataaagttccacttatttcaaagtttgtagaaagtatagaaaaacacatagtaaaacatcgtgttaatgccttcgtaacagtaagtcatgcagcaaaagaatattatcaatctaaaggatataagaaggaagcgaatgttattacgaatgcacctattttaaatgatagcagagaatttaaagaaatcgaaaactttaaagaaatcgtatatcaaggtcaaattgtaatggacagaggatatgaagagtttattattgcttcatcagcttttaaacagaatgctccttcattcataattcgagggtttggtccgcatgaagaagtgataaaagaactgattagttataactcggaaaatattaggttggataaaccagttgaagtaaaagaattggttgataagttagcagaaagtaatgttggtgttatcttgacgaaacctgtatctattaattttgaatatacagtatctaataaaatttttgaatgtatacatgctggtttaccagtaattttatctcctgtcaaagagcatatttatctcaatgaaaaatataaatttggcattgttttaaaggaagttacgccgttagaaattgaaaaggcggttagaaaattaagagataatcacgatttgtttaatcatttacgtcaaaatgcaattaaggcgtctaaaattttgaattggcaaatagaaagtgaacgattagtagaattatataaattttaaagagaggtaaactatgaaattttttgtactttgtgcaattatcagcatgaacatatttatagtaatctctacatttactaaagaagtattagggttccctatagagccggtgtattactcaaccatggttggtatagcattaattactacggtgtttgctatttataagataattgtcacgcaagaaattccgcgagggttaatattattaattgctatatgtttgctttatctagctttttattatttttcaccagataaggaagagaaactagctaaaaataatattctattctttttaacatgggcagttccagcggcaattagtggtatttatattaaatatataaacaaggctacggtagaaagattttttaaattagtatttttcatattttctatttcatttatttttgtaattttaataccaaaacttacaggtgagatacctagctatatcaattttggacttatgaactatcaaaacgcttcgtacctttcagcatttactgccggattaggcatttatttcattatgaaaggttcagtgaaacataagtggatatatgttctatttacaataattgatatccctattgtgtttataccaggagggcgtggaggtgctattttattaattctttacggcttatttgcatttatacttattacgtttaaaagaggaatacctattgcagtaaaaagcattatgtatatttttgcattaagcatatctagtgtattgatttactttctttttacaaaaggttcgaatactagaacattttcatatctacaaggtggaacacttaatttagaaggtacttctggaagaggaccgatttatgaaaaaggtatttactttattcaacaaagtccgttattaggctatgggccatttaactattataaactaatcggaaatataccacataacatcattattgagttgattctatcatttggcttattagggttttttatcataatgatttgcattttgctactagtttataaaatgattaggaactatgatccaaacactatagatttactcgttatgtttatagcaatctatccaatcacattattaatgtttagttcaaattatttagttgtaagtgaattttggtttgtgttgttctattttattacaaaaggacggcgtcatcatggttaagaaagtttttattatggatagcgtaaagacaataattggtacgttgcttatagctttaggattacaatttttagcttatccaattattaatcaacgagtaggtaatgaagcgtttggttctattttaacgatttatacaataataacaatcacgagtgttgtattaggcaatacgcttaacaatatacgattaattaatatgaatctatacaaatccaatcattactactggaaatttgtgtcgatacttttaatttcaattctgattgagagtatagctttaattattgtatttctttacttttttaatttgaacaccatcgatattatctttttaattctacttaatattttaatgtgtttaaggatttatctgaatgtattttttaggatgactttaaaatataatcagattttgtatattgctcttattcaatttttaggtttgctgataggactatttctatattatttaatccaaaactggattgtttgttttattaccagtgaattgtttgcaacgatatatacattggttaaattacggggattaactataggcgagtatcaaagtgaagataataatgtggtcaaagattatgtgatgctactgagtacaaatagccttaataatttgaatctctacttagatagattaatcttattaccaattataggtggaacagctgtaactatatcatttctttcaacatttattgggaaaatgttagctacatttctgtatccgattaataatgtagtactttcatatatttctgtaaatgaaagcgacaatataaagaagcaatatttgaaaactaatctatttgctatagctgcactatgtttagtcatgattatatgttatccaattacattaattattgtctctttactgtataacattgattcaagtttatattcgaagtttattattttaggtaatataggtgttttattcaatgcagtgagtattatgatccaaactttaaatacaaaacacgcatcaataacattacaagcgaattatatgacgcttcacacgattacatttatattcataactattttaatgacaattgcgtttggtctaaatggattcttttggacaacgctgttcagcaacattattaagtatgtgattttaaatattataggtttaaagtctaaattcattaataaaaaggacgtcgattagatgagtgaaaaaaagattttgattttatgtcagtatttttatccggaatatgtatcttctgcgacgttaccaactcaattggcggaagatttaattgcgaatcacattaatgtcgatgtcatgtgtggatggccatatgaatatagtaatcataaacaggtttctaaaaccgagatgcatcgtggaattcgcattcgacgtctcaagtattcgaggtttaataacaaaagtaaggttggaaggatcatcaatttctttagtttattttcaaaattcgtgattaatatacctaaaatgttgaaatatgatcagattcttgtttactctaatccaccaatcttgccattaataccagacgttttacacagactgcttaagaaaaaatattcttttgtggtgtatgatatagcacctgataatgcgattaagacaggtgcaactcgtccaggtagcatgattgataagctgatgcgttacattaatagacatgtctacaagaatgctgaaaatgtcattgtccttggtacggaaatgaaaaactacttactaaatcatcaaatttctaaaaatgctgacaatatccatgtgattcctaactggtatgacatgcgtcaattacaagacaatcgtatctataatgacacatttaaagcttaccgtgagcaatacgacaaaattttattgtatagcggtaatatggggcagttacaggatatggagacacttatctcatttttaaaattaaataaggatcagcctcaaacgttaacaatactttgtggtcatggtaagaaatttgcagatgtcaaaacggcaatagaagaccatcgtattgaaaatgttaaaatgtttgagtttttaacaggtacagactatgctgacgtattaaaaattgcggatgtatgtattgcatcgctgattaaagaaggcgtcggtttaggcgttccgagcaagaattatggctaccttgcagctaagaaaccgttggtactcatcatggataagcaatctgatatcgttcaacatgttgaacaatatgatgcgggtatccaaattgataatggcgatgcacatgccatttataacttcatcaacactcactcgagtaaggaattgcacgagatgggtgagcgcgcacatcaactgtttaaagataaatatacgagagaaattaatactatgaagtattacaatctgttgaagtgaggagataattatgaagcgattattcgatgtagtgagttcaatatatggtttagtagttttaagtccgattctgttaattacagcattactaattaaaatggaatcacctggaccagccattttcaaacaaaaaagaccgacgattaataatgaattgtttaatatttataagtttagatcaatgaaaatagacacacctaatgttgcaactgatttaatggattcaacatcgtatataacaaagacagggaaggtcattcgtaagacctctattgatgaattgccacaattattgaatgttttaaaaggagaaatgtcaattgtaggtcctagaccagcgctttataatcaatacgaattaatcgaaaaacgtacaaaagcgaacgtgcatacgattagaccaggtgtgacaggactagctcaagtgatggggagagatgatattactgatgatcaaaaagtagcgtatgatcattattacttaacacatcaatctatgatgcttgatatgtatatcatatataaaacaattaaaaatatcgttacttcagaaggtgtgcatcactaatgagaaaaaatattttaattacaggcgtacatggatatatcggtaatgctttaaaagataagcttattgaacaaggacatcaagtagatcaaattaatgttaggaatcaattatggaagtcgacctcgttcaaagattatgatgttttaattcatacagcagctttggttcacaacaattcacctcaagcaaggctatctgattatatgcaagtgaatatgttgcttacgaaacaattggcacaaaaggctaaagctgaagacgttaaacaatttatttttatgagtactatggcagtttatggaaaagaaggtcaggttggtaaatcagatcaaattgatacacaaacaccaatgaaccctacgaccaactatggtatttccaaaaagttcgctgaacaagcattacaagagttgattagtgattcgtttaaagtagcaattgtgagaccaccaatgatttatggtgcacattgcccaggaaatttccaacggttaatgcaattgtcaaagcgactgccaatcattcccaatattaacaatcagcgcagtgcattatatattaaacatctgacagcatttattgatcaattaatatcattagaagtgacaggcgtgtatcatcctcaagatagtttttactttgatacatcgtcagtaatgtatgaaatacgtcgccaatcacatcgtaaaacggtattgatcaacatgccttcagtgttaaataagtattttaataagttgtcggtctttagaaaattattcggcaatttaacatacagcaatacgttatatgaaaataataatgcacttgaagttattcctggaaaaatgtcacttgttattgcggacatcatggatgaaacgacaaccaaagataaggcataagtcatctattaaataaaatcaacatacaaatcgttttatttggaggttatagtatgaagttaacagtagttggcttaggttatattggtttaccaacatcaattatgtttgcaaagcatggcgtcgatgtgcttggtgttgatattaatcagcaaacgattgataagttacaaagtggtcaaattagtattgaagaacctgggttacaagaggtttatgaagaggtactgtcatcgggaaaattgaaggtatctacaacgccagaagcatctgatgtttttatcattgccgttccgacgccgaataatgatgatcagtaccggtcatgtgacatttcgctagttatgcgtgcattagatagtattttaccatttttagaaaaagggaatactattattgtagagtcgacaattgcgcctaaaacgatggatgattttgtaaaaccagtcattgaaaatttaggatttacaataggtgaagatatttgtttagtgcattgtccagaacgtgtactgccaggaaaaattttagaagaattagttcataacaatcgtatcattggcggtgtgactaaagcttgtattgaagcgggtaaatatgtctatcgcacattcgttcagggagaaatgattgaaacagatgcacgtactgctgaaatgagtaagctaatggaaaacacatatagagacgtgaatattgctttagctaatgaattaacaaaaatttgcaataacttaaatattaatgtattagatgtgattgaaatggcaaacaaacatccgcgtgttaatatccatcaacctggtccaggtgtaggcggtcattgtttagctgttgatccgtactttattattgctaaagaccctgaaaatgcaaagttaattcaaactggacgtgaaattaataattcaatgccggcctatgttgttgatacaacgaagcaaatcatcaaagcgttgagcgggaataaagtcacagtatttggtttaacttataaaggtgatgttgatgatataagagaatcgccagcatttgatatttatgagctattaaatcaagaaccagacatagaagtatgtgcttatgatccacatgttgaattagattttgtggaacatgatatgtcacatgctgtcaaagacgcatcgctagtattgattttaagtgaccactcagaatttaaaaatttatcggacagtcattttgataaaatgaagcataaagtgatttttgatacaaaaaatgttgtgaaatcatcatttgaagatgtatcgtattataattatggcaatatatttaattttatcgacaaataaaatgtgtcaaactagggcatacatgattaaggaaagataagctgtcatgtgtttgaacttcagagaggataatgttatgaaaaaaattatggttattttcggtacgagacccgaagcaataaaaatggcaccattagtaaaagaaattgatcataatgggaactttgaagcgaacattgtgattacagcacaacatagagatatgttagatagtgtgttaagtatatttgatattcaagctgatcatgatttaaatattatgcaagatcaacaaacgttagcggaccttacggcgaatgcgcttgctaaacttgatagcatcattaatgaggaacagccggatatgattttagtacatggtgatactacaacgacttttgtaggaagtttggcagcattttatcatcaaattccggttggacatgtagaagctggacttcgaacacatcagaaatactcaccatttcctgaagagttaaatcgagtcatggtaagtaatattgctgaattgaattttgcgccaacagtaattgcagctaaaaatttactttttgaaaacaaagacaaagagcgtatctttattactggaaatacagttattgacgcattgtcaacaacagttcaaaatgattttgtttcaacgattattaataaacataaaggcaagaaagttattttactaacagcgcatcgtcgtgaaaatattggggaaccgatgcatcagatttttaaagcagtaagagatttggcagatgaatataaagatgttgtcttcatttatccaatgcatcgtaatccaaaggtaagagcgattgccgaaaaatatttatctgggagaaatcggattgaattaattgagccattagatgcgattgagttccataattttacaaatcaatcgtacctcgtgctgacagattctggtggtattcaagaggaggctcctacatttggaaaacctgtgttggtattaaggaatcatacagagcgtcccgaaggcgttgaggcgggaacatcgagagtaattggcacagattatgacaatattgttcgaaatgtgaaacaattgattgaggatgatgaagcgtatcaacgtatgagtcaagcgaataatccatatggtgatggacaagcatcacgacgtatttgtgaagcaatagaatattattttggattgcgctcagacaagccggatgaattcgtacctttacgtcacaaataataaaaaacccctaatcatgaagttggtttagacaaccagcggtgactaggggtttttaatatatttatttttgatagtggtagccaatatcatatttgaatactttatttgataatattggactttgctgtccatcgtcatcactttttaaacgtacatttttatgagcttctttaaatacatcggaattcaaccaattattaaagctatcttcagattcccaaatagttaagattttaacttcgtctgtatcctcggtatttaatgttttagtgacaaacatttgttggaagccttcaatagtttcaatgccttgtctattgtaaaaacgttcaatcgtttcttccgcactgcctttttgtaattgtaatctattttctgccataaacatgggcaatcactcctctattttatgatttgatttgggtaatgtttttacaaatgtaaagagtacagcggtttgtatgataaccattatgattaatcctacacggactgcaagaacatccaccatataaattgaaaaacctattacaatgtataagctaattaaaattttaattttctgttgtagcgtgtagcctcgatgtaaataaaagttttctacatattctttataaattttttgattaataagccaattgtaaaaccgatctgaacttcgagcaaaacaaaaaactgctacgagtaaaaaaggggtcgttggcagtaaaggtaatacggcacctgcaataccaagcgctgtaaatattaagccaataacgattaaaataagtcgcattgaaaaaactccattctagtactaatgcgcatgtaatattgttttagtaatataactcatgctaaatataatgtgtatgataagtgcaatgactcagtaaaatgaaacgttgttgaattattcttgtcccattaacgcattttaagcgcgactttcataacaaccaaactatttaatgagaattattctcaagtattatagttatattatgtgttttatttttgaaaagtgcaatatgttttcgaaaataagattatttttatgtgcaaaaacgacgcaaaagttttaaaaatgagacttctgtgagctgattattttataaaatgtaaacgcttactatataatgtgaatcatatcgtttaaaagcattattaaatatgatgctaagagatttatattatagccaataaacaaaggagagataatatggcagtaaacgttcgagattatattgcagagaattatggtttatttatcaatggggaatttgttaaaggtagcagtgacgaaacaatcgaagtgactaatccagcaactggagaaacactatcacatattacaagagcaaaagataaagatgtcgatcatgcagtcaaagtggcgcaagaggcatttgaatcatggtcattaacttctaaatcagaacgtgcacaaatgttgcgtgatattggtgataaattaatggcacaaaaagataaaattgcaatgattgaaacattaaataatggtaaaccgattcgtgagacaacagcaattgatattccatttgctgcaagacatttccattatttcgcaagtgttattgaaacagaagaaggtacagtaaatgatatcgataaagacacaatgagtatcgtacgacatgagccgattggcgtcgtaggtgctgttgttgcttggaacttcccaatgctattagctgcatggaagattgcgccagccattgctgcaggtaatacaattgtgattcaaccttcgtcttcaacaccattaagtttattggaagttgctaaaattttccaagaggtattacctaaaggtgttgtcaatatactaacgggtaaaggttcagaatcaggtaatgcaattttcaatcatgatggtgtagataaattatcatttacgggctcaactgatgtaggttatcaagttgccgaagctgcagcaaaacatctagtacccgctacattagagcttggtggtaaaagcgccaatatcatattagatgatgctaatttagaccttgcagttgaaggtattcagttaggtattttattcaaccaaggtgaagtatgtagtgcaggttctcgattattagttcatgaaaaaatttatgatcaattggtgccacgtttacaagaggcattttcaaatattaaagttggagatccacaagatgaagctacacaaatgggtagtcaaactggtaaggatcaattagataaaattcaatcatatattgatgcagcaaaagaatcagatgcacaaattttagcaggtggtcatcgcttaactgaaaatggattagataaagggttcttctttgagccgacattaattgctgtgccagacaatcatcacaaattagcacaagaagaaatatttggaccagtgttaacagtgattaaagtgaaggacgatcaagaagcaattgatatagctaatgattctgagtatggtttagcaggcggtgtattttctcaaaatatcacacgtgcattaaatattgctaaagctgtacgtacaggacgtatttggattaacacttacaaccaagtaccagaaggcgcaccatttggtggttataaaaaatcaggtatcggtcgagaaacttataaaggtgcgttaagtaactatcaacaagttaaaaatatttatattgatacaagcaatgctttaaaaggtttgtactagaataaatatcgtttctgaagcgtgtttgtaggtcagtctagcggtaagtcttaacatttaacggcgttgtttagattttaagcaaaacaaaatatataggaacacgtatcatgatattaggatataatgactaaaataatagcagtaggatggtttttaattgcaaatcatcttactgctgtttttaattatgctaatttgcgatgcagctattataaggacagagttgtttatgaattgtggtgatttagaaatatgaagttcaatatgcaaagtcatcgtttgttttaatatgtggaacaatcattaaagttattgtgattttttgaacttaatgaaactaaacaataaatttgagatacttttttgtcatttttatgtaactaacacaataatctcgtacattattaaaattttctatatgatagggataaagtaaagagcgaatgtgctgtaaaagtttttccaaggtgatattacataaaggtataaagggtaaagattaatgagttgtcatgtaaaggacgatgatgtataaatcatggttaattacggaagcattaatattaatctgagaagctataaagaattatttttaaaagcgacaatattaaatacgacgcatttatttaggagtggcaaacgtatgaatgggaaaaaggcaaatacgataaacagatacaaatattttcatcatgtcaatcatcaaaaaattcaacaaagttctaaaaagacgctgtgggcatcactaatcatcacattgttatttacagtgattgaatttgtcggaggtttagtatctaattcattggcattactgtcagattcatttcatatgcttagtgatgtattagcacttggtttatctatgttggccatttattttgcaagtaaaaagccgactgcacgatacacatttggatatttaagatttgagatattagttgcatttttaaatggtttagcattaattgtaatttcaatctggattttatatgaagctattgtacgtattatttatccgcaaccaattgaaagtggcattatgtttatgattgctagtattggtttactcgttaatattattttgacaattatccttgtaaggtctttaaaacaagaagacaatatcaatattcaaagtgcattatggcatttcatgggagacttattgaactctattggtgtcatcgttgcagttgtattgatttactttacaggatggcgcatcatcgacccaatcattagtattgtaatttcactcatcattttacgtggtggttataaaattacgcgtaatgcgtggttaattttaatggaaagtgtgcctcaacatttggatactgatcaaattatggcagatattaaaaacatagatggcatattagatgtacatgaatttcatttgtggagtattacaacagagcattattcattaagtgcccatgttgtgttagataaaaaatatgagggtgatgattatcaagcgattgatcaagtatcatcattgttgaaagaaaaatatggcattgcacattcaacgttgcaaattgaaaacttgcaattgaatccattagatgagccatacttcgacaaattaacataaataaaacattgtacaggctgggacataaatcaatgttctatgctctacgaagttatattggcagtagttgactgaacgaaaatgcgcttgtaacaagcttttttcaattctagtcaggggccccaacacagagaatttcgaaaagaaattctacaggcaatgcaagttggggtgtgggccccaacaaagagaaattggattcccaatttctacagacaatgcaagttggggtgggacaacgaaataaattttgcgaaaatatcatttctgtcccactcccacgtttgttttggattatgttgcatcatttaaatgattttcgtcaatttctttgatgctatctacatctaacacgacatctttaggtttcaaaatatgaatatgtttttcatcatttgtatgtaaaatgcgttctatgatgtatctttgaccggccattgtttctacagcaatctttttgtttctagctaaacttgctacgacagattctttatccataatgatagccccctatatatatgtttatttacttataccctaacatgatttttatactctttgaaaatatattttacagaattttatctaaatatttaaaaaaatcgctcaatatccttgtaatccgataagaattatagtaatattttttcaaccattgttataggaggtcttattaatgacattatttttattagaagctaacaatcttgattttgcatcaacgaaagaagaactagaagcaaaggcagcatcactatctacgaagacaattccaacattaattgaagtacaagctactgaaaatttaactcatggttattttattgtggaagcaaatgacgaagcagaagctaaacaatttttaacagaagcagatattagtattcaattagtcaaagaagtacgcttagttggtaaagatttagatgaagttaaaaatggtgatgcacatgttgattaccttgtaacttggaacattccggaaggcattacgatggatcaatatttagcacgtaaaaagaaaaattctgttcattatgaagaagtgccagaagttgaatttaaacgcacatatgtatgtgaagatatgtctaaatgtatttgtttatacaacgcacctgatgaagaagcggtacgtcgcgcgcgaaaagcagttgatacaccgattgatggcatcgaaaaactttaataagacaacaagttgatgagatatatgtatataggtttgacgtggatttcgattgcagttaattagaatagctcaatgctataaatgtaagtagttgatatgaagaaactaatgaactaaatgcaagtattttctaaaacaatcattttattgaaatttagtagagctgaaattaatataacgtcgttaattgaataacgcttatgttataagagcactcataccaaaccataatcatctatagatataacaattcacgatataagggctgtgtttggcatagccctttagatatacacttaattcctattaaaatagtagggattaaaagggggcttgtcatgattaaaattcaacaattacaacatcactttggatcacataaagtaattcataactttaatttggacattagcaagggagaaatagtcactttcatagggaaaagtggttgcggaaagtctactttactcaatgttatcggtggatttattcatccatcgtctggtcgtgtcattattgataacgaaattaaacaacagccatctccagattgtttaatgctatttcaacatcataatttgctgccatggaaaacggttaatgacaacattaggattggatttcaacagaaaattagtgatgaagagattaacgcacagcttaaattagttgatttagaagacaggggaaagcattttcccgagcaactgtccgggggtatgaaacaacgtgtggcactatgtcgagcgcatgtgcataagcctaacgttatattgatggatgagccattaggtgcattagatgcatttacacgttataaacttcaggatcaactagtgcaactaaaacataaaacgcaatcaactattattttagtgacgcatgacattgatgaagctatttatctttccgaccgcattgttctgttaggtgaagggtgcaatattatttctcaatatgaaattacagcatcacatccacgcagtcgtaatgatagccacctacttaagattcgtaatgaaattatggaaacatttgcattgaatcatcatcaagttgaacctgaatattatttataaggagtgagtgacgatgaaaaggttaagcataatcgtcatcattggaatctttataattacaggatgtgattggcaaaggacgtctaaagaaccgtctaaaaatgcccaaaatcagcaagtgattaaaattggatatttgccgattacacattcagctaatttgatgatgactaaaaaattattatcacaatacaatcatccgaaatataaactagaattagttaaattcaataattggccagatttaatggacgcattaaacagtggtcgtattgatggtgcatcaactttaatagagctagcgatgaaatcaaaacagaagggctcaaatataaaggctgtggcattgggccatcatgaaggcaatgtcattatgggacaaaaaggtatgcacttaaatgaatttaataatggcgatgattaccattttggtataccacatcgttattcaacacattatcttttacttgaggaattacgtaaacaattaaagattaaaccggggcattttagctatcatgaaatgtcgccagcagaaatgccagccgcattgagtgaacacagaattacagggtattctgtagccgaaccattcggtgcactgggtgaaaagttaggcaaaggtaagactttgaaacatggtgatgacgttatacctgatgcgtattgctgtgtgctagtactgagaggggaattgcttgatcaacacaaggatgtagcgcaagcatttgtacaagattataaaaagtctggctttaaaatgaatgatcgcaagcaaagtgtagacattatgacgcatcattttaaacaaagtcgtgacgttttaacacagtcagcggcatggacatcctatggtgatttaacaattaagccatccggctatcaagaaattacgacattggtaaaacaacatcatttgtttaatccacctgcatatgatgactttgttgaaccgtcattgtataaggaggcatcgcgttcatgacacgtcccacaaataacaaatttatattacctattatcacatttattattttcttaggcatttgggaaatggtcattattattgggcattaccaacctgtattgttacctggtcctgctcttgtaggaaaaagtatatggactttcattgttactggagaaattttccaacatttagcaattagtttatggagatttgtagcgggctttgttgtcgcattgttggttgctattccattgggcttcttgcttggaaggaatcgttggctatacaacgctatcgaaccgctatttcaattgattagaccgatatctccgatagcatgggcaccatttgttgttctatggtttggtattggtagtttgccagcgattgcgattatttttatcgctgcttttttcccaattgtgttcaatactattaaaggcgttagagacattgaacctcaatatttaaaaatagcggcaaatttaaatttaactgggtggtcattgtatcgcaatatattatttcccggggcatttaaacaaatcatggctgggatacatatggcggtaggaacaagttggatatttttagtttctggtgaaatgattggtgcacaatcgggattaggttttttaatcgttgatgcacgaaatatgttgaacttagaagatgttttagcagcaatattctttatcggattatttggttttattattgatcgattcattagttatattgagcagtttatacttagaagatttggtgaataaggagagatgatgatgactttagaaacgcttatcaaagaacaattagatcctcatttagtagaagttgatgaagggacgtattatccgagaacatttattcaacaattatttgtagatggttatttcggtgaggcggcattgagaaaaaatgctgaagtaatcgaagctgtatcgcagtcttgtttgacaacaggattttgtttatggtgccaattagctttttcaacgtatttagaaaatgccacgcagccacatttaaataatgacttacaacagcaattgttatctggagaaatattaggtgctaccggattgtctaatccgatgaagtcatttaatgatttagaaaagttgaaccttgaacacacttatgttgatggacaattggttgtcagtggacgtatgccagctgtaagtaatattcaagaagaccattattttggtgcgatttcgaaacatgaatcatcagatgaatttgtcatgttcattctacgtgccaatcaagatggtatcactctcgttgaaaaaaccaattttttaggggtcaacgggtcagcaacgtatcaaatcacattgaatcaagtcgtagtgccacaatcacaaatcatcacgcatgatgcgaagcagtttgcggcaactattcgcccgcaatttattgcttaccaaattccaataagattaggctcaattaaaagttctttagagttaattgatgcattttcaaatgcgcaaaacggaataaatcaatatttagagtatgatgttgaagcttttaaaaaacgttatcgtcaacttagagaggaatattatgcaatattagatgacggtaacttaacttcacatttaagtgaattaatatcattgaagaaggacattggctatttattgttagatgtaaatcaagcttctgtcgtcaatggtggttcaagagcgtacacaccatattcgccacaagttcgcaagttaaaagaaggattcttcttcgcagcattaacgccgacattaagacatttaggtaaacttgaagcagagttgaaggggtaagtgtgataagctgattttttgtttagatgcgtttgttgaaacattttttaaaataatataaatcttagtttataaacattttctgttaatttgttatatccttttaactaggaaaatatacatttcgtaataataataatcgttatcattgaaaaagtgttaataaggtgtataatgaaaatgtgaacaattaatgaacttcttattttaaagaaggtgaatactatagatacgcatactaaagaacaacaattctcgaatctagtaagatcttatcgtaaagaatacgtgggtaaaggacccaatagtattcgagtgtcgtttaaagataattgggcgattgcacatatgacaggtgttttgagtaaagttgagagtttttacctaaacgacaaacgcaatgaatcaatgctccattatacacgcacagagaagattaaacagatgtataaagaaatagatgtaaatgagatggaaagtcttgtaggcgctaagtttgtaaaattatttacagatattgatttgaatgatgatgaagtcatttcaatatttgttttcgataagtcaatagaataagtgttgctggtgtaaggtacacggtgctgtttgctaacttcgctttgaatttaacaataattcaagggggtggtatgtcaaacggtgccgttttttttgtcatatttttaaaacaagcaacatgcaacacgtactttaaggaagtcaaaatttatcatttaggagagatggatatgaaaatcgtagcattatttccagaagcagtagaaggtcaagaaaatcaattacttaatactaaaaaagcaataggattaaaaacatttttagaggaaagaggacatgagttcattatattagcagataatggtgaagacttagataaacatttaccagatatggatgtgattattagtgcgccattttatcctgcatatatgactcgtgaacgtattgaaaaagcaccgaacttgaaattagcaattacagcaggtgtaggatctgaccatgtagatttagcggcagcaagtgaacacaatattggtgtcgttgaagttacaggaagtaatacagttagtgtggcagaacatgcggttatggatttattaatacttcttagaaactatgaagaaggtcatcgtcaatcagtagaaggtgaatggaacttgtctcaagtaggtaatcatgcgcatgaattacaacacaaaacaattggtatttttggatttggtcgaattggacaacttgttgctgaaagattagcgccatttaatgtaacattacaacactatgatccaatcaatcaacaagaccataaattgtctaaatttgtaagctttgatgaacttgtttcatcaagtgatgcgattacaattcatgcaccattaacaccagaaactgataacttatttgataaagatgttttaagtcgtatgaaaaaacacagttatttagtgaatactgcacgtggtaaaattgtaaatcgcgatgcgttagttgaagcgttagcatccgagcatttacaaggatatgctggtgatgtttggtatccacaacctgcacctgctgatcatccatggagaacaatgcctagaaatgctatgacggttcactattcaggtatgactttagaagcacaaaaacgcattgaagatggagttaaagatattttagagcgtttcttcaatcatgaacctttccaagataaagatattattgttgcaagtggtcgtattgctagtaaaagttatacagctaaatagaataaggatgctgggctagcgattaacgctttcaattttatataaatgaatcatataagcactactgctgttgtaaagatggcagtagtttttttatgattacatctaagtatagtcacggctatgttaggacaatgatttaacatttacgcacatatgtgttcacttacgcaattattgataaatttcattcatttggaataatatatagtcatatagtgctaatttttttgaggcattatatgcaagatgcattgtaaaatcgatgcatttgtttgttaaataactttgtataactaaaaattctttgtttcaacgtataatctaataatagattttatataaatggtagtgtgtatatatgtggataggggtgtagttattaatgaaacgcttaagtacgactttgaaagtacgattgattagcaattttttacagctaattattacgacagcatttataccgtttatagcactatatttaacagatatgttaagtcaatcaattgtcggtatatatcttgttggtttagtggttctaaaatttccattgtccattatatctggttaccttattgagatttttccgaaaaagttgctagtacttatttatcaagcgacgatggtgataatgcttgtgttcatgggcgtatttgggtcacatcaattgtggcaaattattggtttttgtgttgcatatgccatatttacaatcgtttggggattacaatttccagttatggacacattaattatggatgcaattaccgaagacgtggaacattatatttacaagattagctattggatgacgaacttatcggtagctattggggcattgttaggtggcttgatgtatggctacagtatgttactacttttcttaatagcagcttgtatatttttaattgtactctttattttatatatttggttacctcaagaccgaaatcaagtaaagcaaagtgatgacaagaggcatgcaagtcgttatcaaaaattacaaataatgaatatatttcgcagttataaattagttttgaaagaccgtaattatatgttattgatttcggggttcagtatcatcatgatgggtgaattttcaatctcctcatatattgctattagactaaaggatcagtttgaaacaataagtataggttcatatgatattacaggtgctaagatgttagcaatcttgctaatgattaatacggtcgtcgtcattttactcacgtattcaatctcgaaagttgtattgaaaatagattttaaaaaagctttaatcactggtttgctgatttatattgttggctatagtggtctaacctatcttaatcagtttggcttattagttgtttttatgataattgcgactgtaggtgagattatttattcgcctatagtttcagaacaacgctttaaaattattcctaaagctaaaagaggaacatatagtgcagttaatgcattaggtattcatttttcagaaacactagctaggttagggattgtgttgggtgttttcttaacgtcattacaaatgggactgtatatatttatcgttttaacaattggtgctagcatgcttgttgctggtgtattcgggggacaaaaacaagtgaatacaaattgaatttatttaaatatttattttatgcatctttttatattgaaaacctattaatttggtcgtaattaaaatagagataaatttattaagaatttgttaaaatttaaggataacaattgttttatgcgagttgtttgtttaatataaacttgcttcatggatattttgtaacaacaatattgaatttgcaatgagatatgaacaacagaaagtgattaacgagttgtagtgtgctatttatcgaagatgtatgtaatttacattgaaaaatataccaattgtaacgatgatacaagatgtattttagggtagaatatatcgctcatatgttgcgaatggtgttttatattaatcattacataacgagttaattaacatttcgtcggttatcatatcatcatgcaattttagtaagtaatgagtattatgatatgaaagaaggactttttatgattatgggtaatttgagatttcaacaggaatattttcgtatatacaaaaataatacagaatcaacgacacaccgtaatgcgtattgggttaaactcgctaaaaatgttgaagctactaaaatgatgtatgcattatcgacaattgtgcaacaacatgcatctataagacatttttttgatgttactaccgatgacaatttaacaatgatacttcatgaatttctgccttttattgagataaaacaagttccatcttcttccgcaaactatgatttagaagctttttttaagcaagaattaagtacttaccattttaatgattcacctttattcaaagttaaattgtttcagttcgctgatgctgcatatatactattagattttcatgtgtccattttcgatgatagtcaaattgatatttttcttgatgatttatgcaatgcatatcgtggcaatactgttattaacaatactcgacagcatgcacatataaatagaaatgatgataaagacaatcaagatgcatcgcatatagcattagactcaaactattttcggttagagaataactctgacatccatattgatagttattttccaattaagcatccatttgaacaagctttatatcaaacgtatttgattgatgatatgacatcaatagatatggcatcgttggctgttagtgtgtatttagctaatcatataatgagtcaacaacatgatgtcacattaggtatacatgtaccatcacatttaccaaatgatttacacggaaatattgtgccgttaacgttaacaatcgatgcaaaagatgtatgtcaacgttttacaacagattttaataaatgtgtgttgcaaaatatgtcgcaattacagtgcgcgaagtcttcgctttcactagagactatttttcattgttatcatcatatgatgtcttgttgtaatgatgttattgaggatgtacatcaaatacatgatgcacatacatctttagcggatattgaaatttttccacatcaacacgggttcaaaattatatataacagtgcagcatatgatttgctctcaatcgagacgctgagtgacttagttcgaaatatttatttgcaaattactgaagaaaatggaaataaacgaacaactgtagatgaacttaatttgatgacagaacgtgatattcaattatatgacgatatcaatttaagtttgcctgagatagatgatgcgcaaacagttgttaccttatttgagcaacaagttgaagcaacgccgaatcatgtcgctgtgcaatttgacggagtgtttataacatatcaaacattgaatgcacgcgcgaatgatttagcacaccgtttgagaaaccagtatggtgttgaacctaatgatcgtgtcgctgtcatagctgaaaaaagtattgagatgataatagcgatgataggtgtgttgaaagctggtggggcttacgtgccaattgatccgaactatccaagtgatcgtcaggagtacattttaaaagatgcaacgcctaaagttgtaataacgtaccaagctttatatgaaaatggtaaacaaaatattaatcacattgatttgaataagatagcgtggaaaaatattgataatctttctaaatgtaacacgttagaagatcatgcttatgttatttacacgtcggggacaactggtaaccctaaagggacactaattccgcaccgaggtattgttcgcttggtccatcgaaatcattatgtaccattaaatgaagagacgacaattttgttatcaggaactatagcctttgatgctgcaacatttgaaatatatggtgcattgctcaatggtggaaagctgattgttgctaaaaaagaacaattattaaatccaatagcggtagaacaattaatcaatgaaaatgacgttaatactatgtggttaacctcctcattatttaatcagattgctagtgaacgaatagaagtattggtaccgttaaagtatttattaattggtggagaagtattgaatgctaagtgggtggatttgcttaatcaaaaaccgaagcatcctcaaattattaatggttatggaccaactgaaaatacaacatttacaacgacgtataatatacctaacaaagttccaaatcgtattcctattggtaaaccgattctgggtactcatgtttatatcatgcaaggcgagcgtcggtgtggcgttggtattcctggagaattatgtacaagtggctttgggttagctgcaggttatttaaatcagccagaattgacagcagataaatttatcaaagattcaaatataaatcagctgatgtatagaagtggtgatatcgttcgtttgttacccgatggcaacatagattatttatatcgaaaggacaaacaagttaagattcgagggtttaggattgagttgtcagaggttgagcatgcgctcgagcgtatacaaggtattaataaagcagttgttattgttcaaaatcatgatcaagatcagtatatcgttgcttattatgaagcgatgcatacattatcacataataagattaaatcacaattacgtatgaccttaccggagtacatgataccagttaatttcatgcatattgagcaaattcctattactattaatgggaaattagataagaaggcattgcctatcatggactatgtcgatacggatgcctatgtagcaccgagtacagataccgaacacttgctatgccaaatttttgcagatattttacatgtgaatcaagtaggtattcatgataatttctttgaattaggtggccattcattaaaagcaacgttagtggtgaatcggatagaggcatctactgggaaacgattacaaattggtgatttattacaaaagccaactgtatttgaactagcacaagcgattgctaaggttcaagaacaaaactatgaagtgattccagaagctatagttaaagatgattatgtgctgagctctgcacaaaagcgtatgtatttattatggaaatcaaaccataaagatacggtgtataacgtaccttttttatggcggttatcatcaggacttaatgtagctcaattgcaacaagcagttcagcatttgatagcgcgacatgagattctacgaacacaatatattgttgtagatgatgaggttcgacaacgtattgtggcagatgttgtagctgactttgaagaagttaacacgcattttacggatgaacaagaaattatgcgccaatttgtggcaccttttaatttggaaaagccaagtcaaattagagtgagatacattagaagtcccttacatgcatacctgtttatagatacacatcatatcattaatgacggtatgagtaatatacaattaatgaatgatcttaacgcactttatcaacataaattattgttaccacttaaattgcaatataaagactatagtgagtggatgtcgcatcgtgatatgacgaaacatagacaatattggttatctcaattcaaagatgaagtacctattttaagcttaccgacagactatgttagaccaaatattaaaacgacaaatggagcaatgatgtcatttacaatgaatcaacaaatgagacagctacttcaaaagtatgtagaaaagcatcaaattactgattttatgttctttatgagtgtggtcatgacgttgttaagcagatatgctcgaaaagatgatgttgttgtcggtagtgtgatgagtgcgcgtatgcataaaggcacggagcaaatgctaggcatgtttgctaatacgttggtatatagagggcaaccgtcacctgataaaatgtggacacagtttttacaagaggttaaggaaatgagtttggaggcatacgagcatcaagaatacccattcgaatgtttagtaaatgacttagatcaatcacatgatgcctcacggaatccattatttgatgtcatgttagtactacaaaacaatgaaacgaatcatgctcattttgggcatagtaaattaacacacattcaacccaaatcagtgacggcgaaatttgatttatctttcatcattgaagaagatcgcgatgactatacaatcaatatcgagtataataccgatttatatcactcagaaacagttcgtcacatgggtaatcaatgtatgattatgattgattatattttgaagcatcaagatacactacaaatttgtgatataccaaacggtacggaggaacttctaaattgggtcaatacgcatgttaacgatcgaatgcttaatgtcccgggaaataaatctatcataagttactttaatgaagttgtctcacgacaaggtaatcatgttgcgctagtcatgaatgatttgacaatgacgtatgaaacattacgcaactatgtggatgccattgcgcacatgctcctatcaaatggtgtgggcaatggtcaacgggttgccttgtttacagaacgtagttttgaaatgattgcggcgatgttggcgacagttaaagtaggtgcatcttatatacctatcgatattgattttccgaataaacgacaaggtgcaattttggaggatgctaaagtaactgcagtcatgtcttacggcgttgaaattgaaacgacattaccagtcattcaattggaaaatgctaaaggctttgttgaatcaaaggaaaatgaacaatatgatgatttacatggcaatcaacttgaaaacacagcgatgttagataatgagatgtatgctatttacacatctggtacgaccgggatgcctaaaggggttgccatacgacaacgaaatttgttgaatttagtgcatgcatggtcaactgaattgcaattaggcgacaatgaagtatttttgcaacatgcaaatattgtttttgatgcatcagttatggagatttattgttgtttgttaaatggtcatacgcttgtgattccagatagagaggaacgtgttaatccagaacagttacaacaactcattaataagcatcgtgtgacggttgcgtcgattccgttacagatgtgtagtattatggaagacttttatattgaaaagttgattacaggcggggcaactagtacggcatcctttgttaaatatattgagaagcattgtggcacgtatttcaatgcctatggaccatctgagtcaacagtcatcacatcgtattggtcacatcattgtggtgatttgatacctgagacgattccaattggcaaacccttatctaacatccaagtgtatattatgtcagatggtttgttatgcggtattggtatgccaggcgagttgtgtattgcaggtgatagtttagcgataggatatattaaccgtccagaattaatggctgataaatggcaaaataatccatttggtaaaggaaagttgtatcatagtggtgatttagcacgttatacatctgatggtcaaattgaatttttaggaagaatagataaacaagtgaaagttaacgggtaccgtattgaacttgatgaaattgaaaatgtaatattagctattcgtggtatatctgattgtgttgtaacagtaagtcactttgatacgcatgatatattgaatgcttattatgtcggagagcaacaagtggagcaggatttgaagcaatatttaaatgatcagctgcctaagtatatgattcctaagactataacgcatatcgattgtatgccattaaccacgaatgacaaggtggatactacgcgtttgccaaatccatcacctatacaacagtctaataaagtgtatagcgaaccctctaatgaaattgagcagacatttgttgatgtatttggagaggtattgaaacaaaatgatgtcggtgttgacgatgatttctttgaacttggtggtaactcattagaggcgatgttagttgtctcgcatttaaaacgatttggccatcatatttcaatgcagacattataccaatataaaaccgtgcgacagattgttaattatatgtaccaaaatcaacaatcattagttgcattaccggataatctttcggaattacaaaagattgttatgtctcgttataacttgggtattttagaggatagtctaagtcatcgacctctaggaaatacactattgactggcgcgacaggttttttaggtgcttatctgattgaagcactacaaggatacagtcatcgcatttattgtttcatacgtgctgataatgaggaaatagcatggtataagttgatgacgaatttaaatgattatttttcagaagagacggttgaaatgatgttatcaaacattgaagtcattgttggtgatttcgagtgtatggatgatgttgttttacctgaaaacatggatacgattattcatgcaggtgctcgtacggatcactttggtgatgatgatgaatttgaaaaagtaaatgttcaaggtactgttgatgtcatacgtttggcacaacaacatcatgcaaggttaatatatgtgtctacgataagtgtgggaacttattttgatatagacacagaagatgtgacattttcagaagcggatgtctataaagggcaactactaacatcaccatatacacggagcaaattttatagtgaattaaaagtattagaagctgtaaataatggcttagatggtcggattgtacgtgttggtaatttgacgagtccttacaatggaagatggcatatgagaaatataaagactaaccgtttttcaatggtaatgaatgatttgttacaactggattgtatcggggttagcatggctgaaatgcctgtagatttttcttttgtggatacgactgcaagacaaattgtcgcattagcacaggtcaacacaccacaaatcatttaccatgtgctatcacctaataaaatgccggtgaaatctttgttagaatgcgttaagcgcaaagaaattgaactcgtcagcgatgaatcatttaatgaaattttacagaaacaagacatgtacgaaacgattggattaactagtgttgaccgtgaacaacaactagcaatgatagatacaacattaacattaaaaataatgaatcacatcagtgaaaaatggccaacgataactaacaattggctgtatcattgggcacaatatatcaaaacaatattcaataagtaagtagggaaagttatgacagtatttgtaatgcaattacagagtaacttgaaaagtattgaagaattaatatcacaaagtcgttggtcatataaaaaaccgcgtacagtcaactatagatacaatcaagataaactcatgcacagattgggagatattttagtgcaatatggaattcaacatgacacaggtttattaccacatgaatggcattatcacatttcgccacgaggtaaggcagatattgttcaacacaatcgtgatggacagcccatctatgtgagcttatcatatagttatccttatatcgtgtgtgttgtcgataaagaaccagttggtatagatatcgaaaagatatcacaacgtttagactggcgtacgttagtgacgtgtttctctacaaacgaagcacatcaaatatgtagtttaaatgatttttatcaaatatggacacaaaaagaaagttttacaaaattgattggtgaaggtttaatcaaaggattggacatttatgatatgacacaatcacacttttatcaatcacgtgaagtgaagttcaaacaatttatttttgatcagtttatggtacaggtatgtttcttaggagaggcaccctggggttataaaaaagtgtctgtatttcagttattgagtagttaatatgacgtctgacagtatcattgcgcagtgattttaaactatactgcctaaatgtttactgttagatgtatttttattggaaaaatgaaaggtgaatacacgatggcatcattcaaaatcatgacgagattaatgtaagtgataaggtgaaaatatactgagcaatattgaaattgccaaaaataatatcttgttacgacgcatttgagactttaatgctcacgtaagttggctggaatcatatcatgtcagttaataaaataacgtgagcatcaatcatcatactcaaacgatgatttaaaactcacgttaatgttagtcagtgtattaatttaatttatagcgatagacaaaatgttgtcgcactaattcaattgtcatcatccagacgatatggccaaagaattctgacagatgctcttggtatggttgatcccacacagcaggtacagtatgcatgattggcataatgataaggtggaataatacccaaatagcaataccaaaaacagcaccttgtccaattgctaagtaagcgtattttttaactaatatgcagtaaataattgcaatgacgatagaaaaactaaagtggacaataaagcttacccaaggcaattccatatttgaaaatgtatatgtttgatgcgtaaactcactactaaatcctaattgttgcaataactcttgaggtgggttcgttgcattacgttctggtgtgcgaggtggaaacatgacctcccaacctaattttacaattccagataacaagccaccgataattccagcataaatgaatatacccatttgtcgtttcgtcaacttaaggactcctctctatttactatcctcattatagtattttgtgaaaataatcacaataaaaagctttgcaaaacttaaaatattttgataaacaaatttgtaaaaggttattagttttttacatctcatattgtatcgtactgtattcaaaattgttaacgagatgaacggtaaataaatgttttagcgcaatggataatcgaactggaatcatctcgcgtgtcaaaacttgttaggccttaatttcatagttatgaattaaggattgttgtgccaacaaaatcattattgtaaatagattcaatgatatttggcttgtttcctgatgcaatgataactttaggacagccattttcaatcgcatttttggcatctagcactttgggaatcatacctccataaatatcaccatgttcaatatattgatgaatatcgactaatggcaattgaggtataacaacatcattgatgagtacacctgcaatattacttaatacataaataggcgcttttaatgatgatgcaataaaataggcaagcgtgtcagcattaatattgtaaaattctccatcatggttattgaaaccaatcgaattgatgataggtacaaatttagtacataaatactgtaaagcatccttatttaaagcggtcggaacaccgacatatccatattgttgatcaaaagatgtaatttcaaacagctgtgcatccaaaccacataagcctattgcagaacattggtgctggttaaattgagctactaatgcagtgttaacgtctgcaatgagcgtgtgtttagtaatggtcatggttgctttatcagtcactcttaggccattaacaaagtgtggctcgatttgctggtttgataatgcttcattaataaatgggccaccgccatgaacgataatggggtagatgttgtttgatcgtaaatgcttaatgttgttaataattgatggatgcatgtcactaagtgtactgccaccaattttaatgacaataaatttcatctaaccaacaccaccttatgttcgatatgatgcgttaatacgcacataatcataggataaatcacaaccgtatgcagtcgctgcagcgttacctaaaccaagttgaacgtcaattgtgacatgttcatgagttaatgtgttcgacatagcttgctcatcaaatagtacagccatacctttatccacgacaggtatttggttcagttgaacatatgtgcatttaggatcaatttcacatccgctatagccaatagctgtaatgattcgaccaaaattggcatcttcgccaaaaatagctgattttactagatttgaacttacgatagttttaccgatttttcttgcatctgatattgatttagcgcctgacacattgacgctgattaactttgttgcgccttcgccatctctggctatagctttagctaaaaatgtacagacaaaattgaatgcatcaacaaatgtttcccattgtggatggtcttgactaagtatttggtgttcaacttggtgatttgccatgactaataccatgtcatttgtacttgtatcgccatcaacagtaatcatattaaatgtatggtcagtcgaagattttaataattgatgaagtgtattcgattcaatcgatgcatcggttgttataaaagcaagcatggtagccatatttggatgaatcatacctgaacctttggcgctaccaccaattgtaacggttttaccatcgatttttagtgatacagcgatatgttttgtacaggtatcagttgttaaaattgcctcgttaaacgcacctggcgttgcaaaattagtatccttaatatgttcggtcccagtcttaattttatccataggcaaatattcaccaatgaccccagttgaagcaacagcaacatgctcagatggtatttgaagttgttgagcaacccatgtttgtgtttgtcgtgcatcatctatgccttgttgaccggtacaagaatttgcattagctgaattaacaacaagtgcttgtaattttcctttagacttttgtaaagtgtcttcagtgacaataagtggtgcagctttaaactgatttaaagtatatacggcagctgaacttgccaaagacgatgagtaaatccacccaaagtcttttttgttagcgcgtaaaccgatgtgcataccaccagccgtgaagccttgaggtgtactgatatcgccatgtttaataattgaaaagttatattgttgtgatgtcgtttcttgatgtttcattctaacaccccttatggataaactggtgattgatttaggccagtcgttacttcaaaatcatataatatatttaaattttgaatggcttgaccacttgcgcctttgacaaggttatcaatcactgatactaaaattgctgtttgtgttgtttcatctacatagataccgatatcgcagtagttactaccgagtacttcttttgtggttggaaaagtcccaatatctctaattctgacaaatggctgattagcataataagaggtcattaatttatgtaatgattcagtcgtatattcagatgaaaatttgacataaattgttgataaaatacctcgtgtcattggtacgagatgtggtgtaaatatgactgatacatcttgacccgcaatgatagataaatattgctcgatttccggtttgtgtttatggtttccgattgcataagcacttagattttcattcatttctgaaaaatgaacacgttgtgataatgaacgaccagcacctgacacgccggtcttagcatcaataataatagatgacaaatctactattttttcgctaataagtggatgtaatgctaataatgttgctgtagggaaacagccaggattagaaatgagcttcgttccattgttatcaaacgattgccattctgaaatgctgtaaatagcatgattcaaatcatcttgtgctgcagcagtttctttgtaatatgcttcatatatttcacgattcttaattctaaatgcgccagataaatcgataacatgaatacctttttctactaagggagggatacatgttttacttacgggtgctggtgtcgcaaagaaaattacatcacagtcattattgtccactgtaagtgcttcgaaatgttgcataatatgttgtaaatgtggaaatgttaatttcaacggttcatctacttttgaatgtgagtagatgtgtgcaatcgttacatgaggatgtgtttgtaacaatcgaattaattcaattgcgccataaccgctaccgccaacgatacctactgtaatcatcatgaatccctcctatgtcatatataaatgattaattgttaatttttaaaaacgtcttgaaaagctgcaacaatttgatggatttcctctttatcaataactagaggtggagacaatcgaatgatagtacgatgcgtgtctttgcataagattccacgttgaatcagttgatccacaaaaggtgcagcatctgtgttaagctctatgcctataaataaaccacgacctctaatttctttaatactaggatgtttaagttgtagcaacgcttttaataaaaatgaacctaagcgttctgatcgttcaaccagttgttcatctttaagtacatcaagcgctgccgtcgatattgcaatggctaaagggttaccaccaaatgttgaaccatgtgtacctggtgttagaacacgcatgacatcattatttgcaagtacagcagatacagggtataagccgccacccaatgccttacctaaaatataaatgtctggaacaacttgttcccattccatcgcaaaccatttcccagttctaccaagaccaacttgaatttcatctgcaatcattaatatttgatgtttatcacatagttgacgcacagcttgaatatatcctttcggtggtatattaacgccaccttcaccttgaattggttccaaaataattgctgctgtattcggtgaaatagcttgtgttaattgttcaatgtctccaaaatctacagttgtagtgccttgaagtagggggtgaaatcctgctttatatgcgtcgtggttagatagtgataatgagccaagtgtacgaccgtgaaaattgttattcatagcgatgatttcaacttgtccgtcagtaatgcctttaacttcagagccccattttctagcaattttaatggctgcttcaacagcttcagtaccagagttaagggagagtactttgtctttcttagcaagatgacaaattttttcttcccatttcccgagattgtcactataaaggacacgtgaaatgatagacaactttgaagcttgttctgtcatcgctttaacaattgttggatgacaatggccttggtttgcaactgaaaaacccgaaatgcaatctatatattgtttgccatcagtatcccaaactttgacacctttacctttagaaatgacaagcttaagtggtgcataattattagagctataataatcagttaattcaatgattgaattcatcggtctccctcctttatatttatacaatttaaagaattaatattaatatattacagttgttcaatataagtgtcaaatgtaaatttaataatataaagataaggttgtgtttgtattaatgtgatttgtaaaatgaaagtactaatattttttgtggataatcagtgatatgtatgtatacgattgcagtttaatgtagtatgaataaaaaatgccacaagcatatgtttaacatatgactgtggcatagtattatgcttatggaattttacgatgcttaattttataaataatgaagccgataatgaaaccaatcaaactgagaacaacccagcccataccaatgtctgataatggtaaatatttttggctgaaattaatcaaagtttgtgagaatgatgtgcttgaaatgaactctggactagcttttaatccatctactaatgcagcaatcattgtaaagaaaatggtacattgataaataatttttgaatgatggaatttgctactaaataatgttagtacaatcaaggcaattgctaatggatataagaacattaacactgggactgagtacataataatcttagttaagccaacattcgcgaataagaacgaaataaagcttacaactgttgcaatcgctaggtaattcattttagggaaaaggtgttcgaatgtttctgaaaatgccgtaatcaaaccgatggctgtttttaaacaagcaaccataacgataagtgacaacaggacgataccgtagttacctaagtagtattgcgtaatttgcgctaaggcaataccaccattttcactaagtttgaaatgaccaatacttaatgtacccatgattgctagtagggtataaataatccccatcataatgatactgatagtaccagacttaattgtttctttagcgatatcagttggattttcgatacctaactttttaatcgttgcaacaatgatgataccaaatgccaatgacgctagcgcatctaaggtattgtatccatctaaaaagccgttaaataaggcatgtgattgatattgtttactaataggtgcatcagatatgccacctaatggatggataaaagcaaataataaaataattgctaataatactaagaataccggatttaaaaatttaccgatatattctaaaattcttgatggctttctcgcaaaaaaccatgcaatcacaaagaagacgaagctaaaaataaataaatataaagtgatttgctttggtgataaaaatggcgaaaatgcaatttcaaatgatgtcgttgccagtctaggtaaggcgaaaaatggtccgataactagatataaggcaatcgtgaaaatgtaagcatatgttttattaacacgcgatgcaatttcaaataaaccagatgtctttgaaatgccaatagcaatgatacctagaaatggtaagccaattgctgtaattaaaaatcctaagttagcgataaaaacgttagaaccagcagcttgacccaagtgtattgggaagataagattgccggcaccaaagaataaaccaaataacatagaacctataaacatgttttctttaaatgttagtttcttcttcatatatgtatttgttctcctttttagaacttataaaaatctacttaattaagataatatcaaaaattaaacctaaagtgatacataattttgtaataaatactaaattttttgaaaattccggaataaatactgttttttatgtagtaggggcgtaagttaagaacgatttaatagatataggctaagtttatagataggaggttagacaacccgacgtattaatactttgtaaaataaagatacccccttcaacatgatcgaagggggtaagtgtatgtttagttcaatatatttagaaagtcgtttgtagttattgtttgtcccattaatgggaatacattatctattggaaattgatgtagcgtttcgttttgtgcactcatcatatctgtaacaaaaaactgattgtagtttaattgataggcatctcgcgctgtcgtatctacgccaatatgcgttgcgacaccaccaagaacaatcgtatcaattcctcgacgtcgcaattgtaagtccaaatctgttcctacaaatgcactaaaatgtcgtttgtctatgacaaaatcgtcatctctcttgtctaataaatgatggaaacgactgtagtcgtcgccttcttttggtggtaatgagatcattgcatttggttgcaatacatctttaccatcatagaaattcacgcgaacaaaagcgataaagccattgttttttctaaaaacatctattaatttattagcgttttgaacgacattttcagctgtatgtggcgcataatccatcttaagtataccttcttgcaggtcgattaacactaaagcggttttattaaaattaatcatcttatatcagagtccttttcgtttaataaagtattcgcttaaacttataccctgtatacgatgaaattatttattttgttgtgaaaaagctttagcgatatcgatcagtttcttcggtgcgtcttcgacagacattttgacttcgacaaaatgcatcacatcgggatgaccattaattgcattaaacgtgtcttgtaaatcttttgatgattcaacgtcatgaatttcaacatttttaccaccaaatacagctggtaaagctttataatcccacatgtgaatttcattataaggttcatacatgccgtgaataagtcgttctaccgtatagccgtcattattaatcacaaataataccggtttaatatgctgtctaatcatagttgaaatagcttgaacagttagttgcaatgagccatcaccaattaataataagttacgacgatctttgtctgctaattgtgaacctaatgttgcaggtaatgtatagccgatagaaccccataacggttgccctataaaagtattgtttttgtataatgctaaatcataagcaccaaagaatgatgtaccttgatcagcaataatgacatcatttggttttaagaaattttgcatcattttaaaataagtttgttgtgttaatggttctgtgccaacagtataatcgggtgatgttggacgatgatacgcagggaacgttgcactgttcgtatatgaaatattggataactgttttaacaacgatggtagagatatttcatcatttgtaacatcatcaattttgatattgtgatgatttaacataacgacatcatcgatattgaattggtatgaaaatcctgctgttgctgaatctgttaatttggctccaatatttaaaattaaatcgctgttgtccacataatctcgtattttatcttcggcaattttcccgtcgtaaatacccatataatatggattttcctcattaaaagcaccttttcctaatgaaagttgtgctactggtatctgtgtttgatttacaaaatcttctaattcttgatggaggtgaaaactgttaatttcatgtccagtaatgatgataggctgcttcgcttgatgcagtttagttgctaataactctatatatgttgatgcatccgtatctttagttgccgtcacttcaaatggtgtcggtatctcaatttcagagattgcgacatcgattggtaaatgtaaatgaactgggcgtctttcggcgattgctgtattaattaaacgtggtatttcggttgttgcattttcaggtgtgatataaccttgtgcaacggttatatgtgcaaacatttttcggtagtcgtcaaatgtaccttcaccaagtgagtgatgtacatatttaccggcttgttcaacagcacgtgtcggcgcacctgtaatcgcaatgacaggtatgcgttcagcatatgaacctgcgataccgttgacggcacttaattcgccaacaccaaatgtagtaactaatgcagcgagtccattaagacgggcataaccgtccgctgcgtaacttgcgtttaattcatttgtatttcctacccaatctacattgggattgctgataatatcgtctagaaaagcgagattaaaatcaccaggaacaccaaaaattttatcgacgcctgctcgatgaaaagcgtcaattaagtaagctccaatgcgttgtttcataaaaaaaccaccttttctctatatttacacttaaaatgatagcctcgaatacagtgtaaggtcaaggaagttgactttgttgtgaaaacgctaacaatagtgaacaattaatactttttaggaaatgagtatgaaggggggcttaaattgatgatcttaaaattcaaaatttaaggggagagcgaactatcaatgatgccgcaaaatacaatatcaaagaaaaaacaggcgcgtcaccttatgaaggtatacgcacctgtttatagtaagcattatttagcttcaaataattgatcgccaaatgaaatgttgccatgttcaccttgtttaaaatcaaggtttgtaatgtttccttgtgtcacgataataggcgtaatatcactctttgcatgattgcggatgtagtctaaatcaaagttgattaataaatcaccttgtttaacttcttgaccttcctcaacatgtaaagtaaagccttctccgtttaatttaacagtgtctaaaccgatgtggattaatagttctaaaccactatctgatacaagaccaattgcatgttttgttgggaaaatcatttgtattttaccgttgaatggtgcacgaacttcaccttgtgaaggtttaatagcgataccgtcacccatcattttttcgctgaacacttgatcaggcacttctgataaaggtgttacttcaccagttaatggtgcatgaacgatatggctcaattcgcttgttgcagatttatcttctgcaacaacaacagtttcgtctttatcgtcttccatagtagtagggttttctactacttgaccattcataatctgttgcatttcatgtttgatttggtcagatttaggaccaaaaattgcttgcatattattgccgacttctaatacaccagatgcgcctaaatctttcaaaccaggaacatcaactttagatttgtcgttaacttcaacacgtagacgtgtgatacaagcgtctaaatgtttaatgtttgctttgccacccatagcttctaatactgcatatggtaattcagttgctgaagcagtaacagcttgtgattgcttatcttcacgacctggtgttttgtattttaattttacaattaagaatcggaatacgaagtagtaaataactgcgtatacaagacctacaggaatgactaaccaccattgtgtcttattaggtagtacgccaagtaaaacgtagtcgatgaaaccacctgagaaagtataacctaagtgaacatccaataagtacaatgttaagaatgataaaccatcaagtactgcgtgaataaagaataataatggtgctacgaataagaatgagaattctaaaggttctgtaataccagttaagaatgatgttaaagcagcagaacccattaaacctgctactactttcttattttcaggtttagctgtgtgataaattgctaaagctgctgcaggtaaaccgaacatcataacagggaattcaccttgcatgaatttaccagctgtcaaatgtgcgccttcacgaatttgttcgataaagatacgttggtcaccgtgaataatttcaccagctgcatttttccatgaaccaaactcgaaccagaacggtgcgtggaaaatgtgatgtagaccgaatggaattaataaacgcttgatgaaaccaaataagaatacggcaacaccagtatttgaatctaataatcctgtactgaatgcatttaatcctgattgaatcgttggccaaattaatgccattggaaatgctaaaataaatgatgttgtagccatcataataggtacgaaacgcttaccagcgaagaaacctaaataagatggtaagttaatgttatagaacttgttataacaccaagctgccagggccccgataataataccgccgaacacacctgtttgtaatgttggaatacctaaaatgctagcgtaaccactcgctggatcagtaacatttttaggtgtaacttgtaaaaagtcgcccattgttttgttcatgattatgtaaccgacgaatgctgcgatagctgctacgccatcaccgccagctaatccgattgcgacacctaatgcgaaaatcataggtaagttttcaaaaataatactaccggcagctgtcattaatttagcgacattttgaacgccaccattttgtataaacggcaagtagtgttgtaatgcttcgccttgtatagctgtaccgatagctaataacagacccgctgctggtaaaattgcaacaggtaacattagcgctttaccaatacgttgcaattgaccgaaaagtttcttcctcacttgtccaacctccaaagttgtatgtaatatttaagattcaataaaaaagacacgagcaaatagactgtgttggtaaccatcacagcttaatttaactcatgcctaatcttacttagtaacacgttggtgtatgtaattaatgtaaaagaagcaattgactaagtagtatataaaactgatacgttagtttatctagcttaccatcacatcttattgaatcttatttgtttgcgactcctattttagcatggtgaagtatgcgttttcaatacaattattaaattcaatttcaaatctcttaaatgttcacagattattattaaaacataatataagataatcctgaataaaatgtataaaagttgttgtaataatccagcagtagcagctattatcagcacttaaaagaaaggataatctttgatggtgtaataattaacttgtgacagaaatatgtaagattattacaatgaacaggctttaactgattaatattgtaatgtgttttctcttatagtaaaatgtaagcgattacacaactcaactatattttcctaataattatattgataaggagggctactttgacaggcttttcagtgtatttaggacaacctttagatgaagcgtatattaagcgaatgattaaacaaggttaccaaatgatttttacatctgtacaaataccagaagaagatgacgagacaaaatatcattatttcacaaaactactcaatttattaaaatatgaacaagtgacttacctcatagatgctaatccatctattttaacaccatctttttatgagcatcttcgacaatatgatgcacaatttatgattcgtatcgatcatagtacatcaattgaggcaatcgaagcgataatggcacagggtttaaagtgctgtttgaatgcaagtattatttcccgggaattgttaacaagcttacatcaacaattgaatgattttacattactttcattttgtcataactattatccaagaccagatacgggattatctgttgacttggtcaataagaaaaatgaactcatttatcaatttaatccaaaggcacaaatatatggttttattgtagggagtggtttgcgaggtcctttgcataaaggcttgccaacaattgaagcaacgagacatagtcatcctgtcgttgcagctaaattattacaagaaactggtgtatctgaagtgttagttggagactcattgattgaaatgaggcaggcaaaacaacttatagatttttgcaagcataggcatttcacgttatgtattgaagaagtgtttgatacgacagtgacttaccttttcgatatgtgtcataaagtacgcccggataatccggaaaatgtcattcgttcggaaacgtcaagacaaatatgtccacattcgattcaaccacagtttacgacgcaacgacgcattggttcagtaaccgttgataatttgaataacggacgttatcaaggcgaaatgcaaattgtgagacaaacgcttagtgcacatgacaatgtgaatgttgttgcacaaattattaaagaagacttaccactgttaagttgtatcgagccgaatgatacatttgattttcaaaaaactagggagtgtaagaagtgatggaaaatagtacgaccgaagcgcgtaatgaagcgacgatgcatcttgatgaaatgactgtggaagaggctttaattacgatgaataaagaagatcagcaagtcccgttagcagttcgaaaggcaataccacaattgacaaaagtaataaaaaaaacaattgcacagtataaaaagggtggacgattgatctatatcggtgcaggtacaagtggaagattgggtgtcttagatgcagcggagtgtgtacctacattcaatactgaccctcatgaaattataggtattattgctggtggacaacatgctatgacgatggctgtagaaggtgcggaagatcacaaaaaattagcggaagaagatttgaaaaatatagatttaacatcaaaagatgtcgttataggaattgccgcgagtggcaaaacgccatatgttataggcggtttaacatttgctaacacaatcggtgctacaacagtatctatttcatgcaatgaacatgcagttataagtgaaattgcgcagtatccagtagaagttaaagttggtccagaagtattaactggttcaacacgtttaaagtctggtacagcacaaaagttaattttaaatatgatttcaaccatcacaatggttggtgtcggaaaagtttacgataacctcatgattgatgttaaagcaaccaatcaaaaactgatcgaccgttcagtgcgtattattcaagaaatatgtgctatcacatatgatgaagcaatggcgttatatcaggtatctgagcatgatgtgaaagttgcgacagttatgggtatgtgtggcatttctaaggaagaagcaacaagacggttattaaacaatggtgacattgttaaacgagcaatcagagatagacaaccttaggagggatttaaatgaccaaagaacaacaacttgcagaacgaattattgctgcagtaggtggtatggataatatagatagtgtcatgaactgcatgacacgtgtgcgtattaaagtattagatgaaaataaagtagatgaccaagaactaaggcatattgatggtgtcatgggtgttatacacgatgaacgcattcaagttgtggttggacctggtacagtcaataaagtggctaatcatatggcggaattaagtggtgttaaactaggtgacccaataccacaccatcacaatgatagtgaaaaaatggactataaatcatatgcagctgataaagcaaaggcgaataaagaagcacataaagcaaaacaaaagaatggtaagttgaataaagtattgaaatcaattgccaatatctttataccgttgattcctgcatttattggagctggattaattggtggtattgcagcagtactgagtaacttaatggtggcaggctatatttcaggtgcttggattacgcaacttataacagtattcaatgtcattaaagacggtatgttagcatacttagctatttttactggtattaatgcggctaaagaatttggtgcaacaccaggacttggtggcgtgattggtggtacaacgttattaacgggtattgctggtaaaaatattttaatgaatgtcttcactggagaaccattgcaacctggacaaggtggaattattggcgttatttttgccgtttggattttaagtattgtcgaaaagagattgcataaaattgtgccaaatgcgattgatattattgtaacgccgactattgcattgttgattgtaggactattaactatctttatctttatgccattagcaggttttgtttcagacagtttagtttcagtagttaacggaattattagtattggtggcgtatttagtggatttatcattggagcaagcttcctaccgttagttatgttagggcttcatcatatttttacgccaattcatatagaaatgattaaccaatctggtgctacttacttattgccaattgcagcgatggctggtgctggacaagtaggtgccgcattagcactttgggtaagatgtaaacgcaacacaacattacgtaatactttaaaaggtgcattgccagttggtttcctaggtatcggagaaccattaatctatggtgtgactttgccattaggtcgacctttcttaactgcttgtattggtggtggtattggtggcgctgtaataggtggaattggacatattggtgccaaagcaataggcccaagtggtgtgtcactcttaccattaatctcagataatatgtatttaggttatattgcaggattacttgctgcatatgctggtggattcgtttgtacatatttatttggaacgacaaaggcgatgcgacagacagatttgttgggtgattaatgatgacaaatattttatatcgcattgataaacagttgagtgattttacgaagacagaaaagataatcgctgattacattttaaagaatccacataaaatcattgatatgacggtgaatgatttggcagatgttacgaatgttagtacagcatcaattgttagatttagtcggaaaatgacacatcaaggttttcaagagctaaagattgcgatatctcgatacttacccgaagatattgcaaccaatccacatttagaattgattgaaaatgaatctgtagaaactttgaaaaataaaatgattgctagagcaacgaatacgatgcgatttgtagctactaatattatggatgcgcaaattgatgcaatttgtgatgtgttgaaaaatgccaggacaatatttttatttggatttggcgcatcgagtttgactattggtgatctttttcaaaagttatctcgtattggcttaaatgtcaggttattacatgaaacgcatttacttgtgtcaacatttgcgacgcatgatgatagagattgcatgatttttgtgacgaatcaaggtagtcatagtgaattgcagtcaattgcacaggtggccacacattacagtattcccatcataactatatctagtacagctaataatccagtggctcaaattgcagactatgcattgatttatggcagaactgatgaaaatgaaatgcgtatggcggctacaacttcactatttgcacagttattcacggtagatatattgtactatcgatttgtagcattaaattatcatgcgattctagattgtataacccaatcgaaaatggcacttgataattaccggaagcatcttgcgacgatagattttaaacattagatattgtgagcgttctaatataaagttagttgcaacgtaaacaattgaagtttgtgatgtgattcagttgtttgatgaaaaattgttgctacaagtttgtaaaactggcatagaggctattttgaaaatgataaaggcgtgacaaattaaagcaaagttcaggtttgagctttgcttttttcatagatggaaattaaatgctgaagaataattttaatgctaaatgaactaatacgaaggtgctaaaagcaattattatcaaattagtgatatgaatgaaatgtttaaatcgtttgcgttgattgtattcgggacttttatagagtaggtagtagtacataaagagtatggctgcgaacatgccgaatattgaagtgaagttacctacagtgactgccatgtaatgatttaaagttaaatagtaacttagactaataataaaaaataaaatgatttgataggtaattaacaccattcaagtccctccattaatcgtagacaaaaaatttatcaatgatttgattatttgtattcaaattttagtatacgacttacctcaaagacaaatattaaaagataagacaataaaattagaataaatttacgtttgaagataaaaaacaaacatttttcattaaagtttatgatatatttagagcaatagaaagtgtatggaaggggatatgaatggcataccaaagtgaatacgcattagaaaatgaaatgatgaatcaacttgaacaattgggttacgaaagagtaacgatacgtgataataagcaattgcttgataattttagaacgattttaaatgagcgtcatgcggacaaattagaaggcaatcccttaacagataaagaatttcaacgtctgttaacgatgattgatgggaaaagtattttcgagagtgcccgtattttacgtgataaattaccacttagacgtgatgatgagtctgagatttatttgtcgtttttagataagaaaagttggtgtaaaaataagtttcaagtgacgaatcaagtatctgtcgaggatacatataaagcacgttatgatgtaacgatattaatcaacggactaccccttgtccaagttgaattgaaacgtcgaggtattgatattaatgaggcgtttaaccaagtaaaacgttaccgcaaacaaaattacacaggcttattccgctacatacaaatgtttatcattagtaatggtgttgaaacgcgatacttttctaataatgatagcgaactattgaagagtcacatgttttattggagtgataaacagaataaccgaatcaatacattacaatcatttgctgagtcgtttatgagaccctgtcaattagctaagatgatatcgcgctatatgattattaatgaaacagatagaatactgatggcaatgcgtccgtatcaagtgtatgcggtagaagcacttattcaacaagcgactgagacagggaataatggatatgtatggcatacaactggaagtggtaagacattgacttcttttaaagcgagtcagattttatcacagcaagatgacattaagaaagttatctttttggttgaccgtaaagacttggatagtcaaacagaagaggaatttaataaatttgctaagggtgctgtagacaaaacttttaatacctcgcaactggtacgccaactaaatgataaaagtttgccacttattgtaacgacgattcaaaaaatggctaaagcgattcaagggaatgcccatttattagaacagtataaaacgaataaagttgtatttattattgatgagtgtcatcgcagtcaatttggtgacatgcatcgtctagttaaacaacatttcaaaaatgcccaatactttggattcactggtacgccacgttttccagaaaatagtagtcaagatggtagaacaactgcagatattttcggtagatgcttacatacgtatttaattagagatgccattcatgatggtaatgtacttggtttctcagttgactatattaatacttttaaaaataaagctttaaaagcagaagataacagcatggttgaagcaattgatacggaagaagtatggttagcggataaacgtgtggaattagtaacacgacatatcatcaataatcatgataaatatacacgtaatcgtcaatattcaagtatatttacagtccaaagtattcacgcgcttattaaatattatgagacatttaagcgacttaacaaaaagttggaacaaccgttaacgatagctggtatatttacgtttaaacctaatgaagatgatcgtgatggtgaagtgccatatcattcacgtgaaaaattagagataatgattagtgattataataaaaagttcgagacgaatttttcaacagacacaactaatgagtattttaatcatatttcaaaaaacgttaaaaagggcgttaaagatagtaaaattgatatcttaatcgttgttaatatgttcttaactggttttgatagtaaagtactgaacactttatatgttgataagaatttaatgtatcatgatttaattcaagcgtattcacgtacaaatagggttgaaaaagaatcaaagccatttggtaaaattgtaaactatcgtgacttgaaaaaagagacagacgatgcactgagagtattctcacaaacaaatgatacggatacaattttaatgcgcagttatgaagagtataaaaaagaatttatggacgcttatcgtgagcttaaaatgattgtgccgacaccacacatggttgatgacattcaagatgaagaagagctaaagcgctttgttgaagcttatcgtttattagctaaaataatattacgtttaaaagcatttgacgagtttgagtttacaattgatgaaattggaatggatgaacaagagaatgaagactataaaagtaaatatttagctgtgtacgatcaagtaaaaagagcgacggctgagaaaaataaagtatccattttaaatgatattgatttcgaaatagaaatgatgcgtaatgatacgattaatgtgaattatattatgaatatattgagacaaattgatcttgaagacaaagcggaacaacgtcgtaaccaagaacaaattagacgcattttagatcatgcagatgatccgacattgaggttaaaacgagatctaattagagaattcatcgacaatgttgtaccttctttaaataaggatgatgatatcgatcaagaatatgttaatttcgaaagtattaaaaaagaagcggagttcaaaggatttgctggagagagatctatcgatgaacaagccctaaaaacaatttcaaatgactaccagtatagtggtgttgtaaacccacatcaccttaaaaaaatgattggtgatttgccattgaaagaaaagcgtaaagcaagaaaagccattgaatctttcgtggcagaaacaactgaaaaatacggtgtgtaatgattcagccccctcgctagattagtgtagggggcattattatttcattagaaaaggctcatttgttaaattcatcttatcaagaatataacgaatgttccttgttttaaacttattaattaatagagacattttatctgaaaatatcactgaatgctaatactaatcaaagaaaaagtgataattaaaataagatatataataccccaaatagtggatgctcgtatagaaagtttcgacgtaccaattagcatgactgtaagtatgtatgcttgtacaaaaaattgtaagtcgaaagtacccagaatgcgatttcctttagcaaaaatatttaaactagtaatagaatagtcaattaatgataaaccggcacttatttggatggtaagtataattaaactaatagcatttgtaaacagtatgtagcttaacgttgcagagaatatagattttgtattagcatctgagcgcataattctagagataactagaatgattaaaaatgtaaataatacgctgaaaactcttgagaaaaaaatactaatttgactaaaaatttttatttgtgctaatgatgtctctgagagtcctgcttcactcaataactttttatagtccacagatagtccactaacaaatgtatatgtaacaattattatcaaagtcagaaacagcttaatgattaactttggttgaatgcggatatttgcaaagtgattaaacaaaggtagttttgataatgacatatagacctcctaatgatataattctcctatattttatcataaaaataatataaaaaatatattttattaaaactaagtataaaaaatggtttgaagagtatttaacatttataggaggacataaattgaggcgtaaaaggaaatggctaattgttatttgtgtattattagtattgattacgatatcacaaattttgaaacattttaactatggaactgagagtaaagaagcatacaatacatatacggttgaaaaagaaagacaattagatttacaaggtaaggcatatccacgtgaagttaaaacatattataaaaataatcaggttggaacatatttgggtgtgcaagtagcggacgggcaaacagtcaaaaaaggagacatgttaattaattataaaataaatagtaataaacgacagcaacttgttgataagataaatgatactcaacatattattacagaagtttatttaaacattactaaaggtttaaacaatcgagagatacagaagaagttaattgaatataagcagacattatatgaagctcaacagcaattgtatcagtatgatagtcaaaatagggatagtatgtatgcatcatttgatggcaagattatgatcaagaatatagataatgacagtgataatcaacctatactgtatctcatttcaaaggagtctcatattaaaacgtctgttacggagtttgatttaaacaaagtcaaaaaaggagacaaagttaacttaagtattacgagtacgggtaaaacaggagcggggattataaaacaaatctctgagttgcctattagttatgaagagaatttaagtcttcacgaaaatgatgccctgcatttaccagaaagtaacaacgatggggaattagcaaattcaaaatcgatttcggcatctccaatatttaagagtaataacaactctgaattatcaaagtatggagttataattgatgatcttagtctaccaatacgtgcaggttattcgttggaaattaaagtcccattaaatgcgattaaaatacctaaatcagtattaacaaaaggcaataatgtttttattgttaataaaaatagtattgtggaaaaacggaatattcgtataaaaagaatcaatggtgacattattgtagaaaaggggttaaaacctggagacaagttaattaaacaacctaaaagtacaatgaatgatggtgataaggttgagatttcgtcatgatagaattaaagaatgtttataggacttttaaaaacggtgataaaaatattcgagttttaaaagacattaatatacatatcaatgcaggtgaattcatagcgattatgggaccatcaggctcagggaagagcacactgattaatatcttaggatttatagatcgagagtatcatggtgaatatttgtttgaaggaagtaattatcagacacaatctgataatcaattggcaaacataagaaataaaacagttggatttgtttttcaaaattttaaactaattcataataatactattttagaaaatataagtatgccactggtatatacaaatatgaatacgatagaacgaaagaataaagttatgactgtgctcagtgctgtaggcctagatggcaaaggtgattttactcctagtaaactatcaggcggtcaacaacaacgtgttgcaattgcgcgagccattataaataatccaaagtttattattgcagatgagccaacgggtgctttggattcagatacatctaaaattattatggacatatttacatcattaaaccgagataatcatactacaattattttagtcacacatgatcgtaaagtagcagaaaaagctgatcgaataattcatattttggatggtcgtatacaacatgaagaggtgattaaatgaggaaagttttaaatatttttacaatagcttttaaatcaatattgaaaaataaaggtagaaatatatttacaatgataggtataatcatcggtatttcttctgttattacgataatgtctttgggaaatggctttaaaaaaactgctgctgatcaattttcagatgctggcgccggaaaacaagaagcgttgattagctttacttttaaagttgatgagaaaatcaaaaagtatccttttaatcaaagagatatagagttggtaaatcaagttgatggcgtactagatgcgaagctaaaggaaaataaagaagaaggaattgaagccacaataactaatgtccagaaaaaaagtgacatcttcattataaaaaaacaaaatttacactcttttaaagtaggtagagggtttgataaagaggataatgaattacgtaagaaaatagtggttataaatgatcaagtagcaaaaactgtattcaataataatgctattggtaaatcgctatatattgagggacagggatttgaagtcataggaattacggataaactatattctgactcatctaccgttataatgcctgaaaatacattcaactactatatgggacacttacatcaaggtctgcctaccttacagataattattgaagatggttacaataaaaaaactgtagttaaaaaagtagaatcactattaaataaaaaaggatcgggctctgttttaggtgagtatacatatacagacactgaagaaattatcaaaagtattgataaaatttttgatagtattacttattttgtagcagctgttgccggtatttcactttttattgctggtattggagttatgaatgtcatgtatatatctgtagctgaaagaacagaagaaattgcgatacgacgtgcatttggtgcaaaaagtcgagatattgaactacaatttttaatagagagcattttaatatgtgtgacaagtggttttattggacttattttaggtgttgtgtttgcaacaataattgatgtattaacaccagattatattaaaagtgtagtaagtttgagttctgtcataattgcggttagtgtgtcgatattaattggacttctttttggatggataccagctcgcgcagcatctaagaaagagctcatagatattataaaatagtaaatttaaaatggtaaaagtactgaagactaattatcatattaaactgactatcaacaccaacgatggaaatgcgtattagaataaaagtaagatatgtattgcaaaatgtaaattatatattgaatttacgcaaaaaataacatattacttttaagatataaaaaaatattatataatatttttgaggaggaggtggaaggcctatgctaaaattacataaaaaaatagcttggacaggaatcaaaggttcagctataactacatttattactgccttatataatggaagtagtgtttggaacgcgctagctgttgctggtattgcttttggtggtggcgctggtactgcggttgcagctcttggtcgtgcaacagtaatgagatttatcaaacgttggggcgtacgaaaaacagctgcttggtaaaagataatctaattctttataagagaggctttcttttttgggaaagcctctttttaaaaaaggagattcaatgaataattcaatattttatacctatttaaaatttaatcttagatattttatccgtagaaaatttgaaattgtaaaaaggtcgcgacttaatgttactacaaaaatactgtttttaattaaattgattttttcgtcactattattatttatttcaactattatgttagctgactatttcagtgattatattgattttatagaatattatttctatgcgagtatgtttatttacattgtatttataccattaatacctagaactaaattattgatcaatccaatggataaacagctgttatatagatctagtttgagagaagttgacatttttaacttgatatatgcttcagacgttttaaaaaagtttgttggatattttaatttgttgatagttggtatggctattagtttatatcatattagtccttttatatttaacctcaaggttttttgtgcactaatatacttttcaacaatctcttatgtaattcaaattatttttataaatattaaagtcataagcacaaaaaaattattttcttatcactattgtgtttttaattttatgatgggaagcattgtttctgttattggatttgtcgtctcatttcttttagtaaatttattaataaagccctttttagttttttcgacatatgtaataaaaagtaagaaaacttttgaatggtatagttattttcaggatataaagaacgaagtcattattattaatgaaaaagttatgcaattattagattatatatcacctcacactatttttatgagattaaactttgtgaatatatcatttgtgattattacaatagctttatttatagcgttatattattttaataaaatagggttttggtatagaaaagaagatatctatctatcttcaacaaatattaatttttcgttgccaatttcaataaaagctataacaacaatacagctaaaacactggataagtaacaaagaagaagttaatttacataaacctttcttctatattagttattcaatatggttctttttagggtgtttaatctatttttcacagatggcatataatcagttagctaatgcagttatttttattttgatattaaacactataactcgtgatagtttttctgcggggacggatttttttactaaatcattacgttttgattcagatagaaaaagtatcggtttgtataggatgtcaaacactgattttaaacaaatttacgattctaaattatctctaattcgctttattggttttaaagaaacaatacttgctattattttattagcaatatttttaaatcaagacatatatttatatataattggatttgaaataataatcatcaatacagtaataattcctaatttatcattattaccttcgtatttatctccacatttcaatcatcaacattacagtgaattagagtcttttgaagaacaaatttttcttgaagatactgtttttgataaagttaagaattttttatcgtcatcatattttttaattctatttgtaggttacttatctcaacgtaattatattgacataatgatttttataattattttcaacattttagccttaatacttgtttcgttgtttattaggttttctaaacaaaaaataacaaagtcttggagaaagagggatttatatttatagtattaaatacaaaaaaatttttatttttaatatattggtgttaataataggcggattattgggatgcttggtttattacttattaaatattgatttaggtaaaatgatagttgctcaagatttaaatttacaagagattttctttcataatttaatttatttcttctctgcaatatttggttttctgacacttggtctgttaaatataggtatgttactcataaattctgggatgttaggcttttttatagcacatggaatctatagcaatcaattaaaatctattctattagtattagcgccacacgctatatttgagattttagcacttttaattgcttcaacattctcattaggttttttatcatacctttatcaaagaatggtaaagaaaaataaaataaaaaataagatgttccataattttgtaacaacaataataactgttattgtattaacaataatcgcatcattattagaagtttatgtaaccataaattaaggaagtgtatcatgctagttttaaataatcttcaaaaaaaatttactaattcaaaaatggttttgaataatgtgaatgctaagtttagaagtgggagcatcaattgcatagtgggagtaaatggggcaggtaaaacgactttgttaaatattattagtagtatattgatgccaacaaaaggtgatgtatatttaaatagtgaaagtatttttgaaaatagcacactaaaaaaagagattttttacacaccagtaaatccctttttttatgaaaatttaagtgctaaagataatttgtacttaatatgtagcctatataatcggaaaatagatcaaataactattgagaaaactattaaagatgtaggtttgaatatagaagatctaaatatacctgtatataatttttcaagtggtatgaagcaaaaactaaattttgcttctatgttattagtagattcaaatgttttattattagatgaaccatttaatgcccttgaccatgttgctcaaaaaaatttcacacgaattttaaagggattagtttctaaagaaaagataataattttcactagtcatttgcctaatacaattttagaactctcagaaaatatttatttgttaaaagatggatgttttacagataaacgaaaagcacagtcatttaatcaaaccacgttagaaacatggttgttagaaagtcaaaaagaggtgataccttatgaagaaaaatgatttgttagtaatgagtgtagtatatattttaacttcagtcataatgttctacattaatggattaagtaaacaattttttacatatgtagttggtttcccaattatttattttggttatatatgtctagttaatcttataaaaaaaagaagccggaataattaaaagtgaaaaataatttgaaaatagctagagtttcactatctatgactcaaaaggagctagcaaataaagttggagtaactagacaaacaatatctcttatagaaaagggtgtacataacccctctctatcactatgtaaaaatatttgttcggtgttgaataaaaatttggatgagatatttggagagaaaccacaataaaagagcttattgaaagataatctaaaagtcgacaatatatttcttctcagaaactgctattattttgaaaagaaaacacacgtattataaatttaaaataccgaaatatagcattattaaatcaaaaatagaattaaaaaagaaaattaatcgagaaaagtattaaatgtcatttatttgaatgtgttaattatgaaagaaaaagagtaattgatgttaaatatacattgactaagctaagttgacacactcgaaaatctgaatattctaataaaatataaataatcccccgcacttcacatagtggcgggggatttattctggcgtcaaaatgcccagagtatgggtgtgacccttaaatcatggcaaggcacttaaaacttgatatggtgccgagccctaacttagcacaatatagttagtatgacaaagtcatctaacataacacatcagaggttgcccgatttattccagaccatacagtgataaagttacacaacgcatgacttttatttagcaataactgctacttctgaaataagttgctttgcatagtctgattgcggatgtttgataatatcttctgtgttattcagttcaacgatttcgccatttttcataactgcaacgcgatcacatatttcattgataacacccatgtcatgtgtgatgaataaataagtgatgccgaagtctaactgtaattgttttaataactcgatgatatctttttgaattgaaacgtctaaagcggacactgcctcgtcgcaaacaatcactttaggttctacagcaagtgctctcgcgatacttacacgctgacgttgcccaccagataattcgtgtggatagcgatataagaaactttgatctaggccaaccttttctaacaacgatacgacagttttaataatgtcatcattatctttgactttcccatgaatgattagtggtcgtttaatcacatcaatgactttaaatcttggattaatagatgcgaatggatcttgaaaaatcatttgtatctcttgtcgtaaagatttcaattcatcatctttaaataaacttaatggtaattcgttataccaaataaagccttctgacacttcctttagaccgacgaccgtcttagctaatgtcgatttccctgaccctgattcaccgacaatgcctaatgtttcgccttttctaatagccaagttaatatcattaactgctcggtataggctgccactcggtgatgtgtaatccacgctcacgcgatcgaattttaataaaatatcattgtttaacggtcttggcggacgcgtttgatgaatatcaggaatcgcatctattaagcgttttgtataggtatgttgtggcgatttaaaaatactttcaaccgtgccactttcaacgacacttccatctttcattacaatcacatcgtcgcaaaattgatacacagcgcctaaatcgtgagtgataaaaataatagatgtttctgtgtactcataaagggacttcattaactgcagtaattgattttgtgtactggcatctaatgccgttgttggttcatctgcgattaaaatttgtggctttaaaatcaatgccattgctatcatgacacgttgacgcataccaccagaaagttcatgtggataagcatcaaattgtcgagttgcatgttttatacctactttttctaaaatgtttattgtcatcgactttgcttcagatttagatacacgtttatgttgaaatagtacttctgtaatttgtttgccaatcgttaatcttggattcaacgaagagagtggatcttgaaaaatcattgaaatatccttacctcgaatttgttgtaacgctgaagttgataaattatttaacgattgcccattaaaaataatttctcctgttaatgtgtgatctggataatctggtagtagccctaaaatagatttagcagtaatactttttcctgatcctgattcaccaacaatacctaggatatgtttttttcgtaattcgaaagagacattttttaccgcttgaactgtagtttcatcataattgaattgtacattcagactgttgacttctaataaatttgacatgatgttgtgcctccctattcacaaatgtgtaaatttattctatacttttgtatatcatagtaatctactcaagattattttacaaggagtgattatcataattacttatttagaatcttttaagtcgttgtatcacaaggcattttacaagtttgtattatcggtattaagcttgccaatatttttatatgcagtgataaagtttttcttttctgctaagagaaaaaatttttacgctaataattctgaaatttcagaaattgaacgagcgttacatcaaaaatataaatatttatcgcagcaaaagtcatccacacaaatacataaagaagcattaaaaatattcaaggcacaaagttctaatacgagttcaaagaatattgaacaagcacatttttcaacatactttgaaaatttattatttcataagttcatcatgatcaaagtaatattggccttgccgatgttcatcttattgactatttatttacagccattagttagatatatttttgagcgaattgtcatggctgtgattgtcatcattggtgttattgtcagtgtgtttaccattctgtatttttcaccgcttgatgcggcttatagcatactgggacaaaatgcaacaaaggcacagatacatcaattcaatgtattacatcatcttaacgaaccttattttattcaattgtgggataccatcaagggtgtttttacctttgacttaggtacgacttacaaagggaatgaggttgtgactaaagcagttggcgaaagaattccaattacaataattgtcgcagtattagcgctaattgtggcattaattattgcaataccaattggtattatcagtgcgatgaagcgaaatagttggcttgatatcacgttaatgataattgcattaattggtttatctattccaagtttctggcaagggctattattcattttagcgttctcattgaaattggatattttgccaccatcttatatgccagaacatccaatatcgttgattttacctgtacttgtcattggaacaagtattgctgcttctatcacgcgtatgacaaggtcttctgtacttgaagtaatgcgcagcgattatgttttaactgcttatgcaaaaggattatcgacgacacaagttgttattaaacatattttgaaaaatgccattattccaattgtaacgttagttggtcttctagtggcagagttactaggcggttcagcagtgacggaacaagtatttaacattaatggtatcggtcgttatatcgtccaaaaacaactaatacctgatatcccagcagtcatgggtggggtcgtatatatatcaattgtaatatctttagcaaacttaattattgatatattttatgctttaatcgatccaaaattacgtagtgaaattaacgaaaggaagtgaggcatatggtaaaacttacaacaaagatagcttccttaaaactattcgcaagttatgctatagcaacttatattttagttatgttaacgagtgcattaaatctttttaaaggttatgtggccgatacgttctatattgctgaaacattgctaatcattttaaccatcattttaattatcattttaacaacggaacaaacatggaagcatcatgacctatggcgacgtatcgtcgaagtgttgttattgttgatggcattaacaggcaacgtatttacattattaatgtttgtaagtattagacgttaccaacgtacatcgcaaatacatagttataacgggtgggaatcgtttatacgaaaaactactagacatcgtattgcgattatcgggttacttattttagtctacatgctgacattatcaattgtgtcacaatttacatttgatacgacattggctactaaaaatcagttcaatgcactgttacatggaccgagtctagcctatccgtttggtactgatgatttcggtagagacttatttacacgcgtagttgtaggaacgaagctgacattttcaatttcaattatttcagtagttattgcagttatttttggtgtgttactaggcactatcgcaggttattttaatcatattgataatttaataatgcgaattttagatgtagtgtttgcaattccatcattattgttagcggtggcaattattgcatcatttggagcaagtattccaaatttaattattgctttaagtatcggtaatataccatcatttgcacggacaatgcgtgccagtgttttagaaattaaacgcatggaatatgtagatgcagcacgtatcactggtgaaaacacttggaatatcatatggcgttatattttaccgaatgcgattgcgcctatgattgtacgtttttcattaaatataggtgtggttgtattaacaacaagtagtttaagtttcctaggacttggtgttgcacctgatgtagctgaatggggcaacattttacgtaccggtagtaactacttggaaacgcacagtaatttagctattgtacctggtgtttgtattatgttcgtcgttttagcatttaattttataggtgatgcagtgcgtgatgcactagatccaagaattcattaaaaaggtagggatagatgtgaagaaaatcattagtatcgcaattatagttttagcgttggtattaagtggttgtggtgtccctacgaaatcagaagtggctcaaaagtcatcgaaagttgaagtgaaaggcgagcgaccaacaatacatttcctaggacaagcaagttatgaaaatgatatgaatatcgttaaagatcaattggaaaatgcaggatttaacgtgaagatgaatatccaaccagattatggtagctatcgtacacaacgtcaagccggcaattatgatatccaaattgatgactggatgacagtgtttggtgacccgaactatgctatgacggcattatttagttctacaggatcaaatagtttattgaaagataaacatgtagaccagttgttaaataaagcttctactcaaaatgaagcagatgttaaacaaacatataagcaaattgaagatgaagttgtatttgataaagggtatatggcgcctttatatggatcaaaaaagaatttagtatatgacaataaagtgttagataaaaatagtgttggattgccaaattcacgtgcattaatatggcaacaatttgattacaacaatagtagagaacgagatacgcggccacttgtgatgacacaacaagatggtgaaattcctacattggatccaatacgttcaattgcgccgtcagtatattcaattaatatgaatatgtacacaaggttattattattagatgaaaatgatcacttaacaacgaaaggttcgttaagtcgtgattatgctgtgaataaggacaataaagcattttatttcttgttaagagatgatgattattttgcgaaagtggtcaatggacaagcacgtaatactggagagcgtgtatcggctgaagatgttaagttttctttagatagagcacgtgataaaaagtctgtgcctaacaataatacttacaatatgcacaaacatataaatgacatcaagatattaaaagatgaggacatcgatcagttgcgtaaagagaaagacaaggatgataaatcaatctatgataagttgattaaagcttataacgtcaaatcgttaacgacagatggtcaaaaagtaaataataaagacggtatttatcaaattgttaaaattacgacagatcaatcgatgcctcgagaggtaaattacttaacacactcttcggcaggcattttatctaaaaaatttgttaatcaagtaaatcaagaatatccaaaaggatatggggatagcagtacaattcctgcaaattcagatggaaaaaatgcgctttatgcaagtggcgcatacattatgacacagaaaaatgcatatcaagcaacgtttcaacgtaatccaggattcaacgaaacagaaaaaggtagttatggatcacctaaaattaaaaatattacattgaagtttaatggtgatccgaataatgcattgtcagaacttagaaatcattcaattgatatgttggcagatgtgaatcaaaaacattttgatttaattaagtcggataaaaatttaagcattattcgcaaaaatggacgcaagtcagtctttttaatgctaaatattaaaaaaggtatatttaagacgcatccaaacttgagacaagcagtagttaatgcgatagatcaggatcaatttattaagttttatcgtggcgataaatttaaaattgcatcaccgattacaccacttgtcgatactggtaacgagcaacgtcaagatttagaaaaagtagaaaaagccattaatcaataatgttttaaatatttaacagaaagtaggaggatatagtatggtcattaacttaaatgacaaacagacaaaaacatctaaagaagggttaatttccgtatcacatcctcttgcggctaaaattggtaaggatgtattagatcaaggtggcaacgccatggatgccgtgattgcaattcaactggcattgaatgtggtagaaccatttgcatcaggtattggtggtggcgggtacttgctatattatgagcaaagtactggcagtataactgcgtttgatgcacgtgagacagcacctgaacatgtagacaaacaattttatctagatgattcaggcgaatataaatcattttttgatatgactacacatggtaaaactgtcgctgtgccagcaattccaaagctgtttgattatattcacaagcgttatgctaaattgtcattggaagatttaattaatcctgcaattgaactagccattgaaggtcatgcagccaattgggctactgaaaaatattcgcgccagcaacacgcacgattgacaaagtatcatgaaacggcacaagtatttacgcatgaaaatcaatattggcgtgaaggtgattggattgtacaacccgaattaggtaagacatttcaaatattaagagaacaagggtttaatgcattttataaaggtgacattgcgaaacaattagtcaatgttgttaaagcatgtggtgggacaatcattttagaggatctagccaattatgacattcagattaaagcgccaatcagtgcgacatttaaagactatgacatttattcaatgggaccatctagttctggcggtatcacggtcattcaaatattgaagttattagaacatgtcgatttaccatctatgggtccaagatctgtcgattacttgcatcatttgatacaagcgatgcatttagcatatagtgatcgcgcgcaatacttggcggatgataattttcatgaggtgcctgtacagtcattaattgatgacgattatttaaaagcacgcagtacgctcattaatagcaataaagcaaatattgatatagagcatggtgttgtgtctgattgcattagtcatacagatgttgaagaaaatcataccgaaacaactcatttttgtgtgattgataaggaaggtaatattgcttcatttacgacatcaattggtatgatttatggttcaggtatcacgattccaggctacggtgtgttattgaatacgacaatggatggctttgatgtagtagatggtggtattaacgaaattgcaccatataaacgaccactaagtaacatggctccaacgattgtgatgcatcacgggaagccgatattaacagtaggtgcacctggtgccataagtatcattgctagtgttgcgcaaacattaatcaatgtattagtgtttggcatggatattcagcaggctatagatgaacctagaatttatagtagccatcctaatcgcattgaatgggagcctcaattttcacaatctacaatattagcattgattgcacgtggacatgcaatggaacataaaccagatgcctatattggagatgtacatgggttacaggttgacttgaatacacgtgacgcgtcgggaggtgctgatgatacgagggaaggcacagtgataggtggcgatgtattatcaattagaaaacaaccattacctagtccgaaaatatacgataatgacacccatcgagtatatttcaatgatatgcagttgccattatatgctgaacaagtgcggtggatgcatgacaaatattgggttgatgaaagtgttattagaatcattttccctgaagttagtgtgcatattgaagatttaagaagttatgaaatcgccggaaaaaattatatagatattgcctggttggcacggaagaaaggttatcaagttaccttaaaggatgacagtttatacttaactgatgaaacatatcattcagtgaaagcaaacacaaatgcatactatagatatgatcgagatagtatcacaagataatttatgtatttgatatatagtttgaagtggattttgatttttgttgaacgaaagggttcgatttcaaactttagagtgatgcttgagtgtagtaatgttgaagttgttataagaaacgctagtcgcctttgtaaaatataaaacgccccacaaattcgtttttgatgtacaccacaatagttagtctaaaatctaacttgatgtgattcggtacaattaaatgaatgatgtgaggcgtttttataatgtgtgattttaatatgttaaacgataataaatgatttggttatttctataattacatcataagtattaatgttcacttaatttattataagtaaggctttctttgtatataatttggttttttccaggacttgaaaaataaaaataaagtttctgatcttgatgattattgccttttaaatcactcattccctttaattccacctttgttgatgcattactgggaatattatatctacgttttaattgtttaacgtttggattatcattcgacaacttaccagataaattataataatcagtggtaggatcatgtgtgactttcaaatcattgctatttaaaatgcttgttaaatcaccactttgaatcaaaaattgattgttttcgattttttgtttcagcgcgggatcttttacgtcttttgtgaaaacgattttattattaactacttttactggataacttttgtatgtcgagtcagtagcatcttttctatcgtttgtagttgtgtcatattcaccagttattttatgtgtgtttttatctacctttaacaacatacggtcttcttttaaaagctcatctgatccaacaactgaataagaggattctatataccatgtgtcttgatcattattttcataatggggattatcgtgaccatcaatttcataaagcgtttctaagtttttaataggatacgtacttagtacttttttaagaccatctttcaaatgaatttgttcccacttcattgccaaaaacataccgccactgactacaattgaaataataataattgctgctaagtttaaccagaaaattttatgtgctttcatacattcccaccgtttctcaaaatacttcattaacactataataatatattttgaaaaatatttacatcagtattaaagtgaatatcaaattttaaatttatgaaaataatagatatttataaaaagcggaaaagagatacaataaaaaactgcatgacgttgaggagtcacacagtgtaattaaaaatttaaaaagttgttgctaatttttcagcattattaatactagttgctttaatttcttcagttttatgcggttcggcattgtgtccttcaataatgattgtttcatatgatggcacacctaagaatgtcataattgttcttaaataacggtcacccatttcaaaatcagcagcaggtccttcagtataatatccaccacgtgattgaatgtgtaatacttttttgtcagttagtaaaccttgtggtccttcagcagaatatttaaaagttttacctgcaattgaaatagcatcaatatatgctttaactacaggtgggaaagaaaggttccacataggcgttacaaatacatatttatctgcacttaaaaattcttctaaaatgtcactcaatcttgaaactttcatttgttcatcatcagttaacgtttcgccattactcatttttccccaaccagttaatacatctttgtcaataactggaatataagtttcaaataaatcaatatgtttcacttcatcatcaggatgttgttgttgatatgtttcgataaatgctttaccagccgccatagaatttgataccagttcattaaaagggtgtgctgtaatatataatacttttgccatttgaaaattctcctctgtttctgttattttcttaagtataattattatactcgatataaaatttaatatcaatcaaaatattcaaattaccatcattttcttcatctatatttggcagtactactaaagtatgagtgcatttaattatgaaatagttgatttagaatatatacttaatacccaaaatatatgaaggatggatgccactatgacaaagcgaccaaaacgtattttggcaacaattatcatttttctttcactattatttacgattatttatatagatgacattcaaaaatggtttaaccaatataccgataaattgacacaaaatcataaaggacaaggacactcaaaatgggaagacttttttagagggagtaggattactgagacttttggcaaatatcaacattcaccatttgatggtaagcattatggcattgattttgcattgccaaaaggtacaccaattaaagcgccgacgaatggtaaagtaacacgtatctttaataatgaattaggcggcaaggtattacagattgccgaagacaatggagaatatcaccagtggtatctacacttagacaaatataatgtcaaagtaggtgatcgagttaaagcaggtgatattattgcatattcaggcaatacaggtaaacaaacgacaggcgcacatttacattttcaaagaatgaagggtggcgtaggtaatgcatatgcagaagatcctaaaccgtttatcgagcagttacctgatggggaacgtagcctatatgatttgtagttatagaagagtgcccgcagtctaaaaaattaagcaatcattgtgtgagtatgatacttacataatggttgcttttttcaatgaaaatcgtaatgctaagtcatacttgtttgatttagatattacttaaaatgtaagacaaggttgttagcattggcagtgaaatatcgcacataaaaaaacattattgtcacactagaaaatagttgtgtactatatcaattttctgtataaaagtttaattctgacagtaatgtaaacgtttacaatttatgattgacattaataatgactgaatatatgatttatgtaagtatttgtgcaaacgttttcacaaagtgtattgcacaatcaaactgtaaacaaagtatgggaggcataacatggcagaactaaagttagagcatattaaaaagacgtatgataacaacaatactgtagtgaaagattttaatctacatattactgacaaagaattcattgtatttgttggaccatcgggatgtggtaaatcaacaacattacgaatggttgctggactagagtctatcacatctggagatttttatattgatggggaacgcatgaacgatgttgaaccaaagaatagagatattgcgatggtatttcaaaactatgcattatatccacatatgactgtatttgaaaatatggcatttgggctaaagctacgtaaagtaaataaaaaagagattgaacaaaaagtcaatgaagcagctgaaatattaggattaactgagtatcttggtcgtaaaccaaaagcgttatctggtggacagcgtcaacgtgttgctttgggcagagctattgttagggatgcgaaagtctttttaatggatgaaccattatcgaatcttgatgcgaagcttcgagtacaaatgcgcacagaaatattgaaattacataagcgacttaatactacgacaatttatgttacacatgatcaaactgaagcattgacgatggctagtcgaattgttgttttgaaagatggcgacattatgcaagtcggcacacctagagaaatatatgatgcccctaattgcatatttgtggcgcaatttatcggctcaccagcaatgaatatgttgaatgctacagttgaaatggacggattgaaggtaggaacacatcattttaaattacataataaaaaatttgaaaagttaaaagctgctggctacttagacaaggaaattattttaggtattcgagctgaagacattcatgaagaaccaatatttattcaaacttctccagagacacaatttgaatctgaagtagttgtatccgagttgttaggttcagaaatcatggtacatagtacattccaaggaatggaattgatttctaaattagattcaagaacccaagtgatgacgaacgacaagattacactagcatttgatatgaataagtgtcacttttttgatgaaaaaacaggaaatcgtatcgtctaagggggagtattcatgtctaaaattttaaaatgtatcacgttagccgtggtaatgttattaatcgtaactgcatgtggccctaatcgttcgaaagaagatattgataaagcattgaataaagataattctaaagacaagcctaaccaacttacgatgtgggtggatggcgacaagcaaatggcgttttataaaaaaattacggatcaatatactaaaaaaactggcatcaaagtaaagcttgtaaatattggtcaaaatgatcaactagaaaatatttcgctagacgctcctgcaggaaaaggtccagatatctttttcttagcacatgataatactggaagtgcctatctacaaggcttagctgctgaaatcaaattatcaaaagatgagttgaaaggtttcaataagcaagcacttaaagcgatgaattatgacaataagcaactagcattgccagctatcgtagaaacaaccgcacttttctataataaaaaattagtgaaaaatgcaccgcaaacgttagaagaagttgaagctaatgctgccaagctaactgatagtaaaaagaaacaatacggtatgttatttgatgctaaaaatttctattttaattatccgtttttattcggcaatgatgattatattttcaagaaaaatggcagtgaatatgatattcatcagctaggactaaattcaaaacatgtcgtcaaaaatgctgaacgattacaaaaatggtacgacaaagggtatcttcctaaggcagcaacacatgatgtcatgattggtctttttaaagaaggaaaagtaggacaatttgtcactggaccgtggaacattaatgaatatcaagaaacgtttggtaaagatttaggagtaacaacattacctacagatggtggcaaacctatgaaaccatttctcggtgtacgtggttggtatttatctgaatatagtaaacataagtattgggctaaagatttaatgctgtatatcactagtaaagatacattacaaaaatatacagatgaaatgagcgaaattactggacgtgttgacgtgaaatcatctaatccaaatttaaaagtgtttgaaaagcaagcacgtcatgctgaaccgatgcctaatattcctgaaatgcgacaagtttgggaaccgatgggcaatgcaagcatatttatctcaaatggtaagaatcctaaacaagcgttagatgaggcgacgaatgatataacgcaaaatattaagattcttcatccatcacaaaatgataagaaaggagattagttatgacgaaacgtaaccctaaattagcggcattattatctgttatacctggtttgggacagttttataataaaagacccattaaaggtacgatattttttatctttttcatcagttttatttctgtattttatagctttttaaatattggtttttggggattgttcacattagggacagtacctaagttagacgattctcgtgtcttacttgcacaaggtattatttctatcttactcgttgctttcgcaatcatgctatatgtcattaatattttagatgcatatcgtaatgctgaacgatttaatcgcaatgaggaaataaaggatccgaaggcgcgtatggtggcaacatgggacaagacgttcccatacttactaatctcaccaggtacattcttattgatatttgtagttgtatttccattaatatttatgtttggagtagcatttacaaactacaatttatacaacgcgcctccgagacacacattagaatgggttggtttagataactttaaaacgttattcacaattggcgtttggcgcaaaacatttttcagtgttattacttggacattagtatggacgcttgttgcaacgacacttcaaattgcattagggctgtttttggcaattattgtaaatcaccctgtcgtcaaaggtaagaaatttatccgtactgtgttaatcctaccttgggctgtaccatcatttgtgacaattttaatatttgtagcgttatttaatgatgaatttggtgcgataaataatgatattttgcaacctttattaggtgtagcaccagcatggttaagtgatccgttttgggcaaaagtggcattaatcggcattcaagtatggcttggattcccatttgtctttgcactgttcactggagtactgcaaagtatttcatcagattggtacgaagcagcagatatggatggtgcgtctagttggcaaaagtttagaaacatcacattcccgcatgtcatttacgccacagcgccattgttaattatgcaatatgcaggtaatttcaataattttaatcttatttatctatttaataaaggcggtccaccagtgtcagggcagaatgctggtagtacagatatcttgatatcttgggtgtataatctgacatttgagtttaacaacttcaacatgggtgcagttgtgtcattaattattggatttattgttgctattgtcgcatttattcaattcagacgtacaagtacgtttaaagatgagggaggtttataagatgacaaagaagaaaaacatattaaaagcaatcggtatttacagttttatagcgatgatgtttgtcatcattttatatccactactgtggacatttggcatttcccttaatccaggtacgaacttgtatggtgccaaaatgataccagacaatgcaacatttaaaaattatgcattcttactattcgatgacagtagtcaatacctgacttggtataaaaatacgcttatcgtagcatctgcaaatgcactgtttagtgtgatatttgtcacgttaacagcatatgctttttctagatatcgctttgttggtcgtaaatacgggctgattacatttttgattttacaaatgttccctgtattaatggcaatggtcgcaatctatattttgctaaatacaattggtttattagattctttatttggactaacactggtatatattggtggatcaataccgatgaatgcctttttagtgaaaggttacttcgatacgattccaaaagaacttgatgaatctgccaaaattgatggtgcagggcatatgcgtattttcttacaaattatgcttccattagctaagccgattttagcagttgttgctttgttcaattttatgggaccatttatggactttatattacctaaaatactattaagaagtcctgaaaaattcacattagcagttggattgttcaactttattaatgataagtatgcaaataatttcacagtgtttgcagcaggggcaattatgattgcagtacctatagcaatcgtattcttgttcttgcaacgctatttagtatcaggtttaacaacaggtgcgacaaaaggttagtttgaaattaggagtggggcagaattgataaagaaccactaatgacgataaagattaaaaggaggacgttatgatgacgattaaagttggaatcattgggtgtggtggtattgcgaatggcaagcacatgccaagtttacaaaaagttgaaaatgttgaaatgatcgcattttgtgacgtagacatttcgaaagcagcgagtgcggcagaagcatacggaactgacaatgcaaaggtttatgatgattacaaagcattgttaaaagatgacacgattgatgttatccatgtttgtacgccaaatgactcgcattgtgaaattactgtagcagggttgcatgccggtaagcatgtgatgtgtgaaaaaccaatggctaaaacgacagcagaagctcaaaaaatgatagatacagctaaatcaacaggtaaaaaattaacaataggttatcaaaatcgcttcagaccagatagtcaatttttacatcaagcagcgcaacgtggcgacttaggagacatttacttcggaaaggcacatgccattcgtcgtcgtgcagtaccgacatggggtgtctttctaaacgaagaagcccaaggtggaggacctttaatcgatattggtacgcacgcattagatttaacgttatggatgatggataattatgaaccagaatcagtgatgggttcaacattccataaattaaataagcagcatgatgcggcaaacgcttggggttcatggaatccagatgaatttacagttgaagactctgcgtttggctttattaaaatgaagaacggagcgacgatcattttagaatccgcttgggcgattaattctttagaagtggatgaggcaaaatgttcattatcaggaacgaaagcaggtgctgatatgaaagatggtctacgtattcatggtgaagatatgggcacactttataccaaacacgttgaattggaaaacaaaggcgtcgacttttatgaaggtaatgaagtggatgaagctgaagaagaagcaaaagcttggattgatgcagttgtaaatgatactgaaccagttgtgaaaccggaacaagcaatggtagttacaaaaattcttgaagcgatttatcagtctgcaaaatcaggcaaagcaatttactttgaataacatcatacggtaaggaggcacatcatgacaaaattaaaagttggtgtgataggtgttggtggcattgcacaagaccgtcatattccagcattgctgaaactcaaagacacagtctcattagttgcagtacaagatattaatacagtgcagatgattgatgttgcgaagcgctttaatatacctcaggcagttgagacacctagcgagctgtttaaacttgttgatgcggtggtcatttgtacacccaataaattccatgctgatctttctatagaagcattgaaccatggtgtccatgtcttatgcgaaaagccaatggcaatgacgacggaagagtgtgatcgcatgattgaagcggctaataaaaatcacaaattattaactgtcgcttatcattatcgtcacacagatgtcgctatgactgctaaaaaagcaattgaagcaggtgtggttggtaaaccattagtagcacgtgtacaagcgatgcgtaggcgtaaagtacctgggtggggcgtttttaccaataaagcgttgcaaggtggcggtagtttaatcgattatggttgccacttgttagacttatctttgtggctattaggtaaagatatggtgccgcatgaagtgctaggaaaaacatataatcaattgagcaaacaaccgaatcaaattaatgattggggaacatttgatcacactaaatttgatgtcgatgatcatgttactagttatatgacatttgccaatcgagcaagcatgcagtttgaatgttcgtggtctgcaaatataaaggaagataaggtacacgttagtttatcaggagaagatggcggtatcaatttatttccatttgaaatatatgagccccgctttggaactatttttgaaagcaaagctaatgttgagcataacgaagacattgctggtgagagacaggcgcgtaactttgtcaatgcgtgtttaggtatagaagagattgtggtgaaaccggaagaagcacgcaatgtaaatgcccttatagaagcgatttatcgtagcgatcttgataacaagagcatacaactttaatgattattatatataatacaaaattctcaatataaaaagaaggagtgcttttcaatgaaaataggtgtattttcagtattattttacgataaaaattttgaagatatgttagattatgtcgcagaatctggattggatatgattgaagttggaacaggtggtaacccaggagataaattttgtaagttagatgagttgttagaaaatgaagacaagcgacaagcatttatgaagtcaatcacagacagaggcttacaaataagtggtttcagttgtcataacaatccaatttctccagatccgatagaagcgaaagaagccgatgaaacgttacgtaaaacaatccgtttagcaaatctattagacgtgccagttgttaatacattttctggcattgcagggtcagatgataccgctaaaaagcctaattggcctgttacaccttggccaacagcctactctgaaatttatgattatcagtggaatgaaaagttgataccatattggcaagatttagctgagtttgcaaaagagcaagatgtaaaaattgccatagagttacatgcaggatttttagttcatacaccatatacgatgttaaagttacgtgaggctacaaatgaatatatcggtgctaacttagatcctagtcatttatggtggcaaggtattgatccaattgctgcgattcgcatattaggccaagcaaatgcaattcatcacttccatgctaaagatacgtatattaatcaagaaaatgtaaatatgtatggtctaactgatatgcaaccatatggtaacgttgcgacaagagcatggacattccgtacagttggttatggacatagtccatatgtatgggcagatatcataagtcaacttattattaatggatatgattatgtattaagtattgaacatgaagatcctattatgtcagtagaagaaggtttccaaaaagcttgtcaaactttgaaatctgttaatatttacgacaagccagcagacatgtggtgggcataatacgaactcgaggttagtctgaagtttgtctgaagtaagactggtggcagtgttgaatgaatgcatatgtcgccaagccattgccaaaaatttcacaccttaaatcatgtcattgtttgtaaagaaggtgtactttatataagtgtttagcgatggtcatacccattcacagtaacaatcctcaccattgaaaagagtatataaccttttcgatagtgaggtatatgataataaaaaaagcctgttgtcacaatggtcatagacacgacatactttaaaggcttctgaatataatatttcagaacgcactttaaagatggacgtcgatgtcgactaatgtgatgacaggctttcatctttttaaatattcattaatttctcttcttgtttaatacgtacatataagaaatacgcatacggtactaataaaatagttgtatatgttgcgtgtgttaataataatacaccgattaattcaggaatgatgtttaagaagtaatttgggtgttttgtaattttatataatccagatttaataataggatggttaggtaaaatgaataattttaatgtccaaataccacctaaagttttaataaccataaataacatgatataagcaaagattaatataactaagccaataccatttgcaaagctaaatgtatctttattaataaatgcctctacaccagccaatacataaattaaaacgtgtgttattgctaaaaacttcgaatttttaacgccatattcaactgcaccgtctgcttttaattgttttgagtgattaatagatatctttaagctgacaagtctgatacagaaaaagataagtaatatagatagaatcatgatgtcctccgtcattatgtcatatgtataagcgttgattttgacaacataaagtattttatagataaaacttgtcaaatactattaactatttattaattttagtacataaatatgtttctaagtatgtgtttatgttcagtattttggataatttaataattttaaggatattaagcgcttacaccgacgtgatatatttggcttaacgaaaatgattgaggtgacagagatgaacttttttgatatccataagattccgaacaaaggcattccattatcggtacaacgtaaattatggcttagaaacttcatgcaagctttctttgtagtgttctttgtttatatggctatgtatttaattcgaaacaactttaaggcggcccaaccgtttttaaaagaggaaattggattatctacattagaacttggttatatcggattagcatttagtatcacgtacggtttagggaaaacattacttggatattttgtcgatggacgtaacacaaaacgtattatctcgttcttacttatcttatctgcgattacagttttaattatgggatttgttttaagttactttggttctgtaatgggattattaattgtactttggggacttaacggggtgttccaatcagttggtggacctgcaagttattcaacgatttcaagatgggcgccaagaacgaaacgtggccgatacttaggattttggaatacatcacataatatcggtggtgccattgcaggtggtgttgcactttggggtgctaatgtattcttccatggaaatgttatagggatgttcattttcccatcggtgattgcattacttattggtatcgcaacattatttatcggaaaagatgatccagaagaattaggatggaatcgtgctgaagaaatttgggaagagccggtcgataaagaaaatattgattctcaaggtatgacgaaatgggagatctttaaaaaatatatcctgggaaatcctgttatatggattctatgtgtttcaaacgtctttgtatacattgtacgaatcggtattgataactgggcaccgttatatgtgtcagagcatttacactttagtaaaggcgatgcagttaatacgatattctactttgaaattggtgcattagttgcaagtttattatggggctacgtatcagacttattaaaaggtcgtcgtgcaattgtagctattggctgtatgtttatgattacatttgttgtcttattctacacaaatgctacaagtgtcatgatggttaacatttcattgtttgcattaggtgcgttaatctttggtccgcaattattaattggtgtatcattgactggttttgttcctaaaaatgccatcagtgtagcaaacggaatgacaggttcattcgcgtatctattcggtgactcaatggcgaaagttggtttggcggctattgctgatccaacacgtaacggtttaaacatctttggatatacattaagtggatggacagatgttttcatcgtcttctatgttgcattattcctaggcatgattctattaggaatcgttgctttctatgaagaaaagaaaattagaagtttaaaaatttaatataaatcggattaaaagtatcgccaatctattgcaatatagttggcaatcctgccccgacggcatgtgcgtgaagagatgaaagatactgcttctacccttgcaaatatatcatctctatgtctcggggcagatcataattccctgttatgaagtatccttatttgcccgacttagggtgactcaatgaatttactccttacaataaagacatatagcggtgtcaatattgtagggagtattgttttatatttaaactctctaaaaagcggactgaaagaaaagtgaaaacttctctatcagtccgctttttcatagaacaaaatgtaggcgccataatcattagttatgtgctaatctatttagcttgcttacaataatcacttggcgacatttgtaaatattttttaaaatgatagctaaacattttatactctgaaaagcctactttgtctgcaatttcatagtgtttgtaatgtcgatctaacaattgcagagattgtaaaatacgatagcgatttaaataatcgacaattgtaataccaacatgatctttaaatgttcgcatcgcatacgattcactaacatcgatatgttgaattaaatctgaaacagtcactttcgtttgataagattgcttaatttgatcaacaatctgatttacataataatcatcgtattctacttttaatagtggttggaaggcatcatgacaagatgctaagctacggccgttctgtgattgttgctctaataaggtacggacaagtcttcctaaaataacttctaattgtgcatggtctactggttttaataaataatcaagaacatgatgttgaatgccggctttcatatattcaaagtcatcgtaactcgataatatgatgacattacaatctagaagcgcaatatcattgagtaaatcgacgccatttttacgtggcatacgaatatcagtaattactaattctggctgatgttgttgaattagtgataatgcttcaacaccatctttagcagtgtatattgtattgaaatgatagtctccccaaggaatgatttgctttaaaccttctcgaataattcgttcatcatcacaaataactaccttaaacatctacattcccccttgaaagtggtattttataacaaattaacgtaccttgattacgctttgaaaaaatatgaagtcgtgcatgtgaaccatattgaatcattgctttattgtgtaaatgatttaatcccaaatgcttagtatcaaatacatcattattaagagattggcgtacatattgcaggcgagatgacgacatcccgataccattgtcgcaaactaaaacatgtaaattctgacgtgccaatgtcaggcgtatagtaatgtccaatgactcagtatctctaccatgtttaatagcattttctatgagtggctgaagcatcattttaccaattgtctggtgacgcgcttcttcagaactttcaatatggagcttaatcatgtcatcaaaacggatgttttgtattgcaacatactgttcaatgtagttcaactcttcgtttaattccactgtatgtgagtttgtacgtaatgagtaacgtaacatttgcgataattgttggaccacagtttgtgctaatttcggagataacgtaattaaatattgtattgtttgcatcgtattgaataggaaatgaggctggaattggcgttctatttcctttaactgaatatcacgcaagcgacgttctgtatgctcgatagaatggatcagttgctcatttgattcaaataaatcgtaaatataattattaatttcttctagttcactgttgttttttaaaggcgtatatgtacctagatgacgatttttggcatagtaaattttttgaataatcgtttcgatatcttttgtttgtcgtttagccatattatctgcgctaatgaaaccaaatattactagtaaaacaagaactacggccataacaattaacaacgtgataccatcttcaatgttttcatgtatatctttataaataatgagacgatggtcagcatggtttaattttacagattcattcataaatccgaattgttgcggtctatacttttcacctatagtaaaacggtcatcgttggcgtataaaatattgtcatattgatcaacgataagtgcgaattgtcggctatctttcttaatttcacttaaacgtggggtgttagccatataaattttaagcatatatgtactattattgaatttaagctgatgcgttgaaaataaatacatatttttagtgtttaaatgttcataattattggttataaactgatttggtccagataattcataataaagtgttgcgggctgttggtgtattaattttaataattcacgttttgtagcggtaacatcatgatgatttgttaaatcgagctcttgaaacgaattattatgctgtgtaataaatgtctgaatctgcttttcagtgtgatgtaaagatgactgactttcatcaacatgttgatgaatcgtacgatgctcaatccaaatatagatggcatagaagcttactagtccaataataatgactaaaaatactggaaaaatagtagacgcaaataacgatcgtctcaattgatgtctataaggtttgtatgccgtcattgaatcatctccaaaaatttatgatgtggaatgtccggtaatttagatttcggtattaaaggtatgttcttaagattttcgatagactgatcgctttgttcactaacatcctttcgaattgacttggcatcgaactctgcaactaatcgttgttgtactgagcggcttgttaaatattgcactaactttttacgcttaggatgagggtgtgcatttttaactaaagcaataccatcaacatttaacattgttccttcaattggataaacgattgatacaggataacctttgtttttccatgtgcgtgcatcttgttcgtagcttagacctgcgtaatatttaccttttgcaacatcttcaatgactttagacgtctttgacagttgcatcgcatggttttggaattgatgcacatcacttactcgatgatgcatgctataaatagcgcgcatatgttgatagcctgtcgttgttgtatttggatttgagtacgcaattttacctttaagtataggttgtaataaatcttgataacctcgaatcttaatatctccttgtaaatctgaattcactactataactgttggcattaatagaaaactagtaacatatttattgttcgagcgataatcctctaattgctgtgttacagatgtatcttgatagggaacaaaatcttctggatgatcaattgtttctgataacacaccacccataaagacgtcaccacgctccgaaaaatcttcgttatgcaagtttgaaagcagtacttgagtagatccatgtttgatttcaattttgacatgctcttgtttttcaaattcatttaaaattggacgaatcaagtttgattgatacggagaataaactgttaatacatttttatctgattcagagtgacgcgtattagcgcatgatgataaaaaaatgagaaataatagcaagatataaatttttgatttcatgatatcccatcaattctatgtatattttaatacaataattttagcaataaatgacgcataagtaatgttaaatatttagaaatgtttatagatgacttgttaagacgttgcaaatgttgtgatagcacaaaatttttgtttgtcaagacgatttaccgaggctgtaaaatcaaactgttatattttatttgtagctgttatataaaaatcggcaagatattgaacggttcaaaagtgaatttttacgtcaataaaagtatttaatccagtctcttcatatataaaagtaaatctttctaagtgttgatttaacgcttatcaacaatcattttttataaacaaatatatactcctaaattaacttttaaagcaatgaaaatagtgaacattataactgttgtgtaacagaatgcaattagcatattactgttacacaaattagtacagtttctatgttttgacatacatttgatgaaaattgtacataatttatgtgaaaaaaatcacaacaaacatgctacaatgactatgaaaacgttaacatagcatttcaaattcacaacattatacagatggaggcgtttagtatgttagaaacaaataaaaatcatgcaacagcttggcaaggatttaaaaatggaagatggaacagacacgtagatgtaagagagtttatccaattaaactacactctttatgaaggtaatgattcatttttagcaggaccaacagaagcaacttctaaactttgggaacaagtaatgcagttatcgaaagaagaacgtgaacgtggcggcatgtgggatatggacacgaaagtagcttcaacaatcacatctcatgatgctggttatttagacaaagatttagaaacaattgtaggtgtacaaactgaaaagccattcaaacgttcaatgcaaccattcggtggtattcgtatggcgaaagcagcttgtgaagcttacggttacgaattagacgaagaaactgaaaaaatctttacagattatcgtaaaacacataaccaaggtgtattcgatgcatattctagagaaatgttgaactgccgtaaagcaggtgtaatcactggtttacctgatgcatacggacgtggacgtattatcggtgactatcgtcgtgtagctttatatggtgtagatttcttaatggaagaaaaaatgcacgacttcaacacgatgtctacagaaatgtcagaagatgtaattcgtttacgtgaagaattatcagaacaatatcgtgcattaaaagaattaaaagaacttggacaaaaatatggtttcgatttaagccgtccagcagaaaacttcaaagaagcagttcaatggttatacttagcataccttgctgcaattaaagaacaaaacggtgcagcaatgagtttaggtcgtacatcaacattcttagatatctatgctgaacgtgaccttaaagcaggcgttattactgaaagcgaagttcaagaaattattgaccacttcatcatgaaattacgtattgttaaatttgctcgtacacctgattacaatgaattattctctggagacccaacttgggtaactgaatctatcggtggtgtaggtattgacggacgtccacttgttacgaaaaactcattccgtttcttacactcattagataacttaggtccagctccagaaccaaacttaacagtattatggtcagtacgtttacctgacaacttcaaaacatactgtgcaaaaatgagtattaaaacaagttctatccaatatgaaaatgatgacattatgcgcgaaagctatggcgatgactatggtatcgcatgttgtgtatcagcgatgacaattggtaaacaaatgcaattcttcggtgcacgtgcgaacttagctaaaacattactttacgcaatcaatggtggtaaagatgaaaaatctggtgcacaagttggtccaaacttcgaaggtattaacagcgaagtattagaatatgacgaagtattcaagaaatttgatcaaatgatggattggctagcaggtgtttacattaactcattaaatgttattcactacatgcacgataaatacagctatgaacgtattgaaatggcattacatgatacagaaattgtacgtacaatggcaacaggtatcgctggtttatcagtagcagctgactcattatctgcaattaaatatgcacaagttaaaccaattcgtaacgaagaaggtcttgtagtagactttgaaatcgaaggcgacttccctaaatacggtaacaatgacgaccgtgtagatgatatcgcagttgatttagtagaacgcttcatgactaaattacgtagtcataaaacatatcgtgattcagaacatacaatgagtgtattaacaattacttcaaacgttgtatacggtaagaaaactggtaacacaccagacggacgtaaagctggcgaaccatttgctccaggtgcaaacccaatgcatggccgtgaccaaaaaggtgcattatcttcattaagttctgtagctaagatcccttacgattgctgtaaagatggtatttcaaatacattcagtatcgtaccaaaatcattaggtaaagaaccagaagatcaaaaccgtaacttaactagtatgttagatggttacgcaatgcaatgtggtcaccacttaaatattaacgtatttaaccgtgaaacattaatagatgcaatggaacatccagaagaatatccacagttaacaatccgtgtatctggttacgctgttaacttcattaaattaacacgtgaacaacaattagatgtaatttctcgtacattccatgaaagtatgtaacaaaatttaaggtgggagcactatgcttaagggacacttacattctgtcgaaagtttaggtactgtcgatggaccgggattaagatatatattatttacacaaggatgcttacttagatgcttgtattgccacaatccagatacttggaaaattagtgagccatcaagagaagtcacagttgatgaaatggtgaatgaaatattaccatacaaaccatactttgatgcatcgggtggcggtgtaacagtcagtggtggcgaaccattgttacaaatgccattcttagaaaaattatttgcggaattaaaagaaaatggtgtgcacacttgcttagacacatcggctggatgtgctaatgatacaaaagcatttcaaaggcattttgaagaattacaaaaacatacagacttgatattattagatataaaacatattgataatgacaaacatattagattgacaggaaagcctaatacacacatccttaacttcgcgcgcaaactgtcagatatgaaacaacctgtatggattcgacatgtccttgtgcctggttattctgatgataaagacgatttaattaaactaggggaattcattaattctcttgataacgtcgaaaagtttgaaattctgccatatcatcagttaggtgttcataagtggaaaacattgggcattgcatatgaattagaagatgtcgaagcgcccgatgatgaagctgttaaagcagcctaccgttatgttaacttcaaagggaaaattcccgttgaattataaatacaattcagaccgaaaagaaagcatatgcaacttcaagagtgaaggggcatatgcttctttttcaattgagtattgagtattagcaagacgtagtaagtatatgagacaagtcctacaatggttgaaggaatacgtttttgtaagtagctatgctgataaagaatgtgatgccttgttaaaggtggggttccaatatcatcgaatgggttattaattgctacttgcatatgaatatgagtcttttcaaatttttattgaccctgagtaatgaaaaatattaagatgaaacttaatattaaagcaatgcggagcgtgattatgaagagaattagtaaagatatatgggcagtatttaaattactgtatcaaaataaagggcgttttagcattaatgccttactattgcagttaatcatgatttttattagtagtacatacttaattttactatttaatatgatgttaaaagtagctgggcaaagccaacttacgattaacaattggatggaaatcataagtcatcctgccagtgtgatacttcttattatattcatattaagtgttgcctttctgatttatgtagagttttcattgttagtttatatggtttatgccggctttgatcgacagattattacatttaaatccatttttaaaaatgcctttgtaaatgtgcgtaaactcataggtgtaccagttattttctttgtcatttatttaatgttaatgatacccattgccaacctaggactaagttcagtattaacaaaaaatatttacatacctaaatttttaacggaagaacttatgaaaacgacgaaaggtataatcatttacggtacctttatgattgctgtatttatattaaactttaaattaatatttaccttaccgttaacgattttaaaccgccagtcgttatttaaaaatatgagactaagttggcaaattacgaagcgaaataagtttcgacttgttatagaaatagttatattggaactcatcattggtgcgattttaacattaattatttcaggagcaacatatcttgctatttgtgtagatgaagaaggagataagtttttagtctcatcaattttatttgttgtattgaaaagcgcattgttcttctattatttatttacgaaattatcattaatcagtgtgttagtactgcacttaaaacaagagaatgtattagaccaaccgggcttagaatttaaatatccaaaaccgaaacggaagtctaggttctttataatttcaatggtgcttgcagtgacatgttttatcggttataacatgtacttactttacaataatactatcaatacaaatatctccattattggccatcgtggtttcgaagataaaggggttgaaaattctattccgtcattgaaagctgctgcaaaagcgaatgtcgaatacgttgagttagatacaattatgacgaaagataaacaatttgttgttagtcatgataacaatttgaaacgtttaacaggtgttaataaaaacatttctgaatctaatttcaaagatgtcgtcggtttgaaaatgcgtcaaaatggacatgaagcaaaacttgtatccttagacgaatttattgaaacggctaaacaatcaaatgtgaagctactagttgagttaaagccacatggtaaagaaccagcagattatacacaacgtgttattgatattttgaaaaagcatggtgttgaacatcaatatcgtgtgatgtctttggattatgatgtgatgactaagttgaaaaaagaagcgccatatctcaagtgtggttatatcattccgttgcagtttggtcattttaaagaaacatcattagatttctttgtcatcgaagatttttcttattcgccaagacttgttaatcaagcgcacttggaaaataaagaagtctatacttggactattaacggcgaagaagatttaacgaaatacttacaaaccaatgttgatggtattatcacagatgacccagcattagctgatcagattaaagaagaaaagaaagacgaaacatacttcgatcgttctataagaattttgtttgaataatataaacaaagacctctaaagttatcaagatgataccttcagaggtctttttaatgttgccatctatgggataggcaatcgtttcattcgtttatattcatatgacaagtatttgtatggcaatttggcgtcacaaacacttacatgatttattggtgaattattaattgttttgtgaatgcaaagggttagaaattgaattgtaaatactttctaatctttgtttcgctttagtcatttgatccaaatttttagtgcgtatagcggattttgcaatatagtgcgcagctaaaatatcgcgtttttgaaacgcatctaaatttaggtacgataatttatttaagtcagtgtttgctattaattcatgtaattgatctacaagcgcttgatgttgatacgtatgtgatgtagtttcagatttgcttgctaatttaataccagtcgtatcaaggagcgccgctttaataccagcaactaaatatgttttgattttcatttgtgttgtcatgctttgttactcctttgatgtacattaatcaaaaaaattatacactattgtatattgcaaagctaattaactataacaaaaagatagttaatgctttgtttattctagttaatatatagttaatgtcttttaatattttgtttctttaatgtagattgggcaattacattttggaggaattaaaaaattatgaaaaagcaaataatttcgctaggcgcattagcagttgcatctagcttatttacatgggataacaaagcagatgcgatagtaacaaaggattatagtaaagaatcaagagtgaatgagaaaagtaaaaagggagctactgtttcagattattactattggaaaataattgatagtttagaggcacaatttactggagcaatagacttattggaagattataaatatggagatcctatctataaagaagcgaaagatagattgatgacaagagtattaggagaagaccagtatttattaaagaaaaagattgatgaatatgagctttataaaaagtggtataaaagttcaaataagaacactaatatgcttactttccataaatataatctttacaatttaacaatgaatgaatataacgatatttttaactctttgaaagatgcagtttatcaatttaataaagaagttaaagaaatagagcataaaaatgttgacttgaagcagtttgataaagatggagaagacaaggcaactaaagaagtttatgaccttgtttctgaaattgatacattagttgtaacttattatgctgataaggattatggggagcatgcgaaagagttacgagcaaaactggacttaatccttggagatacagacaatccacataaaattacaaatgagcgtataaaaaaagaaatgatcgatgacttaaattcaattatagatgatttctttatggagactaaacaaaatagaccgaattctataacaaaatatgatccaacaaaacacaattttaaagagaagagtgaaaataaacctaattttgataaattagttgaagaaacaaaaaaagcagttaaagaagcagacgaatcttggaaaaataaaactgtcaaaaaatacgaggaaactgtaacaaaatctcctgttgtaaaagaagagaagaaagttgaagaacctcaattacctaaagttggaaaccagcaagaggttaaaactacggctggtaaagctgaagaaacaacacaaccagtggcacagccattagtaaaaattccacaagaaacaatctatggtgaaactgtaaaaggtccagaatatccaacgatggaaaataaaacgttacaaggtgaaatcgttcaaggtcccgattttctaacaatggaacaaaacagaccatctttaagcgataattatactcaaccgacgacaccgaaccctattttagaaggtcttgaaggtagctcatctaaacttgaaataaaaccacaaggtactgaatcaacgttgaaaggtattcaaggagaatcaagtgatattgaagttaaacctcaagcaactgaaacaacagaagcttctcaatatggtccgagaccgcaatttaacaaaacacctaagtatgtgaaatatagagatgctggtacaggtatccgtgaatacaacgatggaacatttggatatgaagcgagaccaagattcaacaagccaagtgaaacaaatgcatacaacgtaacgacaaatcaagatggcacagtatcatacggagctcgcccaacacaaaacaagccaagtgaaacaaacgcatataacgtaacaacacatgcaaatggtcaagtatcatacggtgctcgcccaacacaaaaaaagccaagcaaaacaaatgcatacaacgtaacaacacatgcaaatggtcaagtatcatatggcgctcgcccgacacaaaaaaagccaagcaaaacaaatgcatataacgtaacaacacatgcaaatggtcaagtatcatacggagctcgcccgacatacaagaagccaagcgaaacaaatgcatacaacgtaacaacacatgcaaatggtcaagtatcatatggcgctcgcccgacacaaaaaaagccaagcgaaacaaacgcatataacgtaacaacacatgcagatggtactgcgacatatgggcctagagtaacaaaataaatttataactctatccaaagacatacagtcaatacaaagaattatgtatctatacaacagtaatcatgcattctatgatgcttctaactgaattaaagcatcgaacaatcggaagcatatttctaaattatttattcattatagtcttaaacataacatgacctaatatattactaacctattaaaataaaccacgcacatctaagtgatatacgacaatcacagcaataataattgctttagaaagtcgtaccgaactggaacttacaagtctagttcgaacacacactgatgtgagtggttttctttattttaaacatgaacaatcagataagttactagcattagcaaatattattaaatcaaagggcttcgattcataaaatttaaaacaatgattaaaattagacgtgtaaatgttaaattctaaaacggaaataaccaccatcccattaaaccacttttttgttcaatcactatatttcacacagcttcattaataaaacgaaattgcttcaacccgcttcaacttcagcctacttcattcaataacctaacgaatccgcttcatccaaaatcaaccattctaacgcacatactcaaatatagcagctgcacccatgccgacaccaatacacatcgtaaccatgccgtaacggctatcgggacgtctacccatttcattaagtaaacgcgcggttaacattgcccctgtagcacctaatggatgacctaaagcaatagcgccaccattcacattcgtacgtgatatatctagacctacttctttaatagatgcaatcgtttgagaagcaaatgcttcgttcaattcgatcaaatcaatgtcttcaacagatagattgctgagtgacaatacttcaggaatcgcatatgcaggcccaatacccataattttcgggtcaacgcctactgccttataaccaacgaatcgtgcaataggtgtcacgcctagttctttcactttatctccagacattaaaactacaaatcctgcaccatcagaaagtggggcagatgttcccgcagtcacagtgccgtcagctttaaatactgtacgtaatttggctaatgcctccatcgtggtgtcagggcgtataaattcatcttggtcaaagatatttgtgtgtacttttggtcctgcgtttgtatattcaactgagtttacccgtattggaataatttcatctttgaaccgaccatcacgttgtgcgtcataggcacgttgatgacttctgacagcataagcatcttgatcttcgcgtgatacgtcaaattgggatgctacattttcagcagttaaacccataggatatgacgcacctatatcatcatattgtaaggttggattgtttgtgggctcgttgccacccattggtacggcactcatcaattcaacgccaccagctacaagtatatctccttgaccagccataatttgattggctgcaatcgcgatggtttgtaatcctgatgagcagtagcgattcactgtttgacccggtaccgtgtcagataatcccgcacgcaatgcaatcgttcgtgcaatgttttgtccttgtaatccttctggaaaagccgtaccaacaatgacatcttcaatcatattcttattgaattttccgtcaatacgtttcaatacgccttgtaatgctttggctgcgacatcatcaggtctttcgtggaataatgcgccttgctttgctttcgctgcggctgaacgcccataagctacaatgtatgcttcttgcatggttatcatcctctcttaatgactatcttttaattacgtaatggcttaccagtttttaacatatgtgcaattctttcatatgattttttagattttagtaagtcaataaagccaattttctccaacgattgaatgtaacgttgatttataaatgtatttcttggtaaatcaccacccgctaaaattgtggcgatatttaaggcgatatgataatcatggtcgctaataaaatgcccccgtctttgcgcatctaattgtccttggatcaatgctttgaagtcttcacctaaagcgatatattgatgtctaggattcggaatatagtttgtttctgcttcatatttcgcacgtttgagcgcaacttcgacacgttgtgctgtattgaaaataatcgtatctgtatcacgtaaataaccataacgacgtgcctcaaaggcatttgtagagactttcgcaaatgcgatattcgtcagtacttttgtcatggaagcttgtttgtcatcaaacttatgcgatgtgcgtaatatgcgatcagccatttctgcaaggccaccgccactcggtaataagccaacgcctgcttcaacaagacctatatatgtttcacttgcagcgacaacaataggtgagtaaagtacaagctcacagccaccgcctaaggcacgaccttgaacagctgtgactactggtttcaaactatacttcaaacgattaaagctataatgtaatttatcaattgattgtgcaacgacatcatctacaagaccgtcttcatgcgcctttttcattaagaaaaggttagcacccacactgaaattattaccatctgcataaatgaccatacttgtgtaatggtcattttccagtaaatcaatggcatcaactaacgcatcgttgaattcatcggtaatgacattatttttactttgtaatttcagtaacagttgatcatcatgagttacggaaagtttggcatcacctttatcccaaagttcatcttttacgaagtgagaaacaggtgttgcatattcaatggtctcatcttgtttataaaagccaccatctaaatcactaatccattgtggtaagtctccaagttcgtcttccatacgtgttttaacacgttcgtatcccattgcatcccataattggaatggaccaagtttccagttgaacccccagacaagcgcacggtctatgtctcggaaatcatcggtagctttaggtacattgatagcagagtaatagaaattattacgtaatgtctcccataaaaatagtcccgcttcgtcttgcgcattgaatatgacatcaaggttatgcactaagtctttattaaattcatttaaaattggtaattgtggttgcgatacaggtacataatcttgtttttcaacatcgtaaacaagtcgagctttagtttctttatcctttttgtaaaatccttgtttcgttttacgtccgagtgcgccattgtcaaacaacgtatttacaattttgacatcatgaaaataaggcgtttcttcaggtacttgttgcatgcctttaattacagacactgcaatatctaaaccgactaggtcggatagggcatatgtacctgttttaggacgaccaatcgcttgcccagttaaagcatccacatctacaatgcttaacttgtgttgctcggcgcgatacataatatcattcattgtttgcgtgccgactctatttgcgacaaagccaggcacatcattgacgacaatgacacctttacctaatacattttgcgcgaaattttttacatctaatatgatagattccttcgtgtgtgacgtaggtattaactccactaatttcataatacgtggtgggttaaagaaatgtagaccaaagaatcgttcttgatccttctcgttaaatgcttgagcaatcgcattaattggaatacctgatgtatttgtagcaaataaagcatcttctttagcatgttgtagaacttgttgccaaacagcatgcttaatttcaatatcttctttgactgcttcgatatataaatcagcatcatcatttaccaagtcatcatcaaaattaccatatgttaaatgactcactagatttaagtcgaatagtagcggccgtttcttatctgtaattttatcgtaagattttttcgcaatgagatttggatcgtttttgtccactacaatatctaatagttttactttaagtccagcattcacaaagagtgctgccagttgagcgcccatcgtgcctgcgccaagaacggttactttattaattgtcatagtgattcctccaatttagttgaggataagataaccattaagataattggaataacgttgctattttataaaattaattaagtatctttgacagtcatcttagcctcttatttaaggaaaaagctttatgcttaaaataagtcttttttagtgaaattaatgcatctcatataattatttgctatttatacgaaagcagaatctccagtcaaagcgcgtccaattactaaggcattaatttcatgtgtaccttcgtacgtgtaaatcgcttctgcatcagagaagaaacgtgcaatatcataatcgtcagctagtatgccattaccacctgtaataccgcggcccatagctactgtctcacgcaaacgtaaggcattcatcatcttcgccgttgaagttgcaacctcgtcatattcaccatgtgcttgcatattagctaattgagcacatgttgccattgcttgagctaaattaccttgcatcattgctagcttttcttgtattaactgatatttactaattggtttgccgaattgcttacgctcagtgacataatctaatgtggcacgtaaagcgccagccataccacctgtagccatataagcaacgcctgctctcgttgaataaagaattttggcaatatctttaaagcttgttatgttttgtaagcgatccgcttcatctactttgacattagttaatttaattagtgcgttaggaacaatgcgaagtgcgattttattatcaatgacttcaatatcgacgccatcttgttctggtctgactacaaagcaatggggtttgccagtttttttatttactgcgaatactggaatgacatcagatacatgtgcaccaccaatccatttcttttcaccattgataacccaagtatcgccttggcgttcagcgactgtttcaagacctcccgcaacgtccgaaccgtgttctggttcagttaaagcaaagcatgtacgcagttcatgtgactgtaatttaggtacatatttcgcaatttgttctttgctacctccgaaatagaaagtgttatgccctaaaccttggtgaacaccgagtagggtagctaaggaaatatcaaatcgcgcgagtaggtaagacatgaaaaactgaaatagttgactaggcattttggcgtttggacgatccttgtaaagtaatggattgttaaaataatttaattctcccagatctttaaaatagtcctcgggtacagtagcgtctatccaatgttgattaatattttcacggtacttactttctagcaatgaatctacttgttgtaaaaattcgacttcaccgtctgttaaacctttagcaatactaagtacatcttcaggaaataatgtttttaagaccgtttctttttcaaatgtcatataaattcctcctaaaaataatatgaatactaatgtgaaatgcatttaattcaaaaacaacacgctttatttgtaaacgcttacactaaatgtcaaaaatttttatcacctttaaagtgtttgtgagactttgtcattcatcatttgtcgaatcgcaagtttatctggtttctgcgtactgtttaacggcatatgtgtcactggtacatacattcttgggactttataacctgctaaacgacttcgcatatgttgatctaaaatttcagcgtaatgaggttcatcttcgcgaagtataatggctgcagcaattgattcaccatattttggatgatcatagccaacgaccacacaccggtctactagtggatgctcagctaaagcattttcgacttcagatggtaagacattttcgccaccagttatgattaattcttttttgcggtcaataataaatatatcgccatcgtcgtccatcttcgctaagtcaccagttaataaataacgaccatgaaatgctttggcagtctctgctggtttattccaatatcctggcgtgacatttttagccttaattgcaagttcgccaatctcaccagtaggtacttcctcaccgttatcatcaaggatacgtgcatcaacgaacatgactgctttaccaatactcattggcttacgttttgaattttccggtgtattaacaagtacaagaggtgcttcagttaaaccatagccgttaataatgtttatgccatattgtttaaaagctgcttggatacttggtaatggttgtgaaccaccttggatgatataatccatagctctaaaattttcaggattaaaattactagcacgtagcgtactataatacattgtcggaatcatgataataaatgtagggtgatattgtgcaatcatgtcattcaattcttcgccgttaaagtaacgttgaagaataagtgtgccacctgacattaatactggtaatacagtatcgttaaaccctaaaacatggaacattggtgttgatacaatcgtaatatagtttgaattgaacttgtacgtcagctctaagtttgcaccgttatgaacaaatgattcatatgagaacatcacacctttaggtgatccggttgtaccacttgtataaattaatgctgcaagatcttgtggttcaacaggtgttgcttgaaaaggttggtgataatctggatttacgatttcatcatattgcgccacatcaatatccatatgcaataagttttggtcaatatcggtgagtgaacttaaatgtttttcagcatagaagagcagttttaattgtgcatcttccacaatggctgcaatttcttttgggttaagccgccaattcaatggtaaaaaaaccgcacctgttttaaaacaagcaaacaataaatctaatattgcaatatcatttggcgcaaaaataccgataacatcgccttttttaacaccttgagatgttaaataatgtgccatattatcagcgcgtgcattgagttgttggtatgtccaagatgtttgttttgcgtgatcaataacggcaggcttgtcatcatcgaagtctgaacgcgtttttatccaatcgaaattcattagtataccccctttagcttcactttcatactttatgaattgattgtttaagttgtccccatttttctttgtaaatgctggtatcaattaattttaaatgatcagcaataattggtttaaaagccatttgattcaaaatatctttatgcaaatcaagacctggtgcaatttcaattagtttcaagccttgattggtgagctcgaatactgcacgatcagtaacaaaatagacttcttgctcgagtaattgtgaatattgtgcattaaagtcgatatggctcacatctgatacaaatttctggttttgtccttcagtttcaatgtttaatcgttgattatgacatgagacatgactgccagctacaaaagtacctgaaaagataattttatttacagattgcgtaatgtctataaagccaccacatccatttagtcggtcattgaagtaagacacgttgacattgccgtattgatcaacctcagcaaagctaagataggcaactgatacaccattgttataaataaaatcccatgctcgatcatgaggcatgcgcacatctgcattgtaattcataccaaaatgttcacgactcccaacgaatccaccgaaaatgccaacatctagaatcggttgcacatcatgttcaacacattcttcgtgcaataaattagagagttcattattgatgccataaccgatgctaattgtatcgccataagttaaaaactgagcagcacgtcggagaatcaatttgcgactattaaaaggtaatgcgggttcaggtattccatcaattcgttcttctccagacaaggctggtaaataatgactctgaattacttggcggtgattcttttcatcttctgtgacgtatacataatcgacaagatttcctgggataacaacttcattcggttttagttgatagtcgtcaactaaagctttaacttgtacaataactttcccatgattggctttcgcgtttaatgcgacatgataacactcgctcaagtacgcttcttgagttaaataaatgttaccttgttgatctgcgtatgttcctctcagtagtgccacatcaacgctagggaatgtgtaatgtaagtatgtttcatcgttgatggttactaatgaaactaaatcatcagttgttcgtgtatttactttaccgccaccgtatctaggatcaacagctgtgtttaatccgattttagtaataactccaggtaataattgattactctgacgataatgagttgcaatgataccttgtggtaaaaaataagcttcaatgtcattatttttcattgcttgtgccgttttggaagaagccgttaaaatgctcataatgacacgtttaatcatgcgacgttctataaaatcatctaaatccggtgcggcacctaaactatggatatcattcgctaatataaacgttaaatctttgggcgtatgatatgtgtcatgttgcgctaacacagcacgtagaacttcggcgggtaagttggctacagctaatgctggtaaaccaatcacatcaccatctttaatgatatgttgtaagtcgtgccatgtgatttgtttcaagcaagtcacctccatcacatttgataaaatatagcgtttttacactttgtgtaaacccttacaagaaatataacataacgacgtttaaaatcaattagaaatatctttttattctgataatagacacagtatagacacattttaatggttgataacaattgtaatatcaagggtttgtaatgaattgaatatcattaaaatacttatataaaaatattgctcggaatataaaaagttaaataggttttgagttttaaatatgaaatacaaagcgcccaatcgaacaaagtatttatattaaaatatggaaaatccatcaatattaaattaaaatagttttattatgaaaagtgaaagtaggtaagtctatggaaggtcttaatcatcgaagaaatacagaaaaagaagagacaacacaaacgcaatcagttgcacctaatacaggtgaagaggggatgtcatcagcaagtacacaatcaactaagacgtccgacatacataatgaatctatcaataaacaaatggaagccaaagcgcatgaaacagcgcaaaatgcagatttaaaaaccgaagcaagaagtttatttgataatgcaaccaaatcaatcggtagactagccggcaatgatgaaagcttaaatcttaatttaaaagatatgttttctgaagtatttaagccgcatactaaaaacgaagcagatgaaatatttatagcgggtactgctaaaactacgccagcaatttgtgacatatcagaagaatgggggaagccatggctcttttctcgagtattcatcgctttcacagtaacatttattggattatgggtcatggcagcgatttttaataacactaacgcgattccgggtctcatttttataggggctttaacagtaccattatcgggtttgttcttcttttatgaatcaaatgcgtttaaaaatattagcatttttgaagttattatcatgttctttattggcggcgtattttcattactaagtacgatggtattatatagatttgtcgtttttagtgatcaattcgaaaggtttggttctttaacatttttcgatgcatttttagtaggattagttgaagaaactggaaaagcactcattattgtttatttcgtcaataaattgaaaacaaataagattttgaatggattattaatcggtgctgctattggtgcagggttcgcagtttttgaatcagcaggttatattttgaatttcgctttaggggaaaatgtcccattattagatattgtcttcacacgtgcgtggactgcgattggtggtcatttagtttggtcagcgattgttggtgctgcaatagttattgcgaaagaacagcatggctttgaattcaaagatatttttgataaacgctttttaatattctttttatcagccgttggtttacatggcatttgggatacatctttaactgtacttggcagtgatacgttgaaaatatttattttaatcgttattgtgtggatacttgtattcattttaatgggggcaggtttaaaacaagtgaatttactgcagaaagaatttaaagaacaacagaaaaaagtagacgaataataattaaagcttatgttgctcatatgtttgtgacataagctatttttataatttgtctttaaaagagtggaataggaatactttttggagttaaaaaagtgtttcacgttaaacaaatagtgacaattagatttatataaaatgaacatgattcattgaaagtatgtaataatcattttattgaaattcatcaaacagaaattaatacaatcatataagcaaattaaaccacgccataatcatattggatgacttcggcgtggtttttatagttgaagcagggctgagacataaatcaatgtcccacactcccttatcgttcaatcgttgttcgataatcgattaaatagataccttcaggtgttactttataatttttaaccttagagttagcagcgactatttgatcgttgtaagcaatataactgtttggtacatctcgacttgataatttaataatatcattagaaatattgtgacgttccttaacatctacagtatgattcaattgattaattaaatcatcgacgttgctattattgtagtctcctttattaatagcaccatcttttttatatgcttgattaaagaaataacctgtatcaccgcgagggattgttccgaaactatacatcgttgcatcccatgcagaacggtcttttaagtaaccttctatgtcatcaacacttttaatgtcgatttcaatatttgcttttttagcatctgattgtaatacttgcgcaattttcgatagctctggacgaccgtcatacgtaattaacttaatttttaaagggtgttcttttgtataaccatctttagctaataacgtttttgcttgttcgatattttgtttggttaacttaggttctttaatatatggaattttatcattaaatggactcgttgcaggtttcgcataaccttgataaatatgatctgcaataccttgtctatcaatgatatgatctaatgcttcacgaacggatttagtcatttttttattagtatgattatacataagtaaagaagttctaaatccagattcttttgacacttttaaattttgattattttctatgtcatgaactttattaactgggacatcagttattaaatcatctttttgagattctaaatttctgacgcgattattgccgtcttcttggtacgtcacagtaatatgatcaagtttcggtttaccttgccaatagtccttaaaattcgacaatgatatttttcgagattgcttataatcttttatttggtaagggcctgtaccaacaggagtttgattaacatctgatttagcatctgtataataaattgccataaaaggattagctaattcagatacaagttcagggtaagcggagttggttttaattgtcagtttttgacctttagcggtaattgatgatattggtaatgaatatttgaccaagtcgctttttttcatgctattttcaaggctagatttcactttttctgcagtcaatttttgaccgttttgaaatttaatattatcttttaattctatatctaacgttgtatcatttggttgatgatacgatttcactaatgctttttctatttttccttgatcatttgttttaaataatgattctgcagcaccaatcttaactggtacatctgtttcataaggtgcaatagactttgtttttaacggtaacgaaatatttaagtctttgccagatgaatgcattgagccacatcctgataacactaatactgctgaaaatatagttgctagtcttttaaacttcatttcattaacactctctttctaattactatgtaaaacccaacaattaatattttaaaactttattttgttaaagtaaaatgttgttcaagtttagtaattattaaagttcaattaattgtagtaattatgctttttaaaaataaatattagaaatgaagttagcgacatttatagtgattcacgataaacatatataactaagtattgagcaactgctgtagtactacagcttggttatgtttagtatcttttgctgcatataacaatagaacatgattatgctgatttacaatatcctttaatttttcaaaagcatctttttgcgcatcctgatcacgtaattctttttcatatttttctttaaaagctccaaaaagtttaggatcatgttggaaccattgtcgcaactcagtagaaggggcaatgtcttttaaccaataatctaggttagcagttcttttcgaaatacctctcggccagactctatcgactaggatacgaatagcgtcggtattatctttattgtcataaatccgtccaatatctacggtcatcttgtgaactcctttcttatgaaattcagtgagcatacatcaatgcatgttgtggtgggacgaccaaataaattttgcgaaaatatcatctctgtcctactcccaattaaaaaacagccatgacaaagtaaagtcatagctgttttggtatagatgtcatttatttttacgtttagttaaatacttcaaaccaactgcaaagaccgtgtacccggctatggtttgtatcaatgttttaattaaattattatttttaacaataatatttgcagtaacaatacttacgaaatataatgcaaatacttttacgtaacgttgattaagtttcatatgagcactaaacctcttttctcagttatactgcaacgcttagtcttggaataaatgtttcgtagtgtacgcgatccatatcgtaatttaaagatttaagtgcttcgatcatagattgtaagaattttgtaccaccacagatataaatttcaggtttatttgctaaaaatgcttgtaattcttcagtgccaatatagccttgtttatcttttaagtgtgtatataatttagcgttgtcataatggcttgcgatactgttgaagttgtctttgaaaggtaaatgttgttcattttcagcaacttgaaccatctgtgtatctaaacctttggcagaggcagcttcatacattgctactaaaggtgtgacgccaatacctgaacctaagaaaagttgtggttcagtcgtattctctaatacgaatccacctacaggcgcagctaaattaatcatatcgccttctttaatctcatcgtgtaaaattgttgaaacttcgccttcatgttctgttgtgacatcacgtttaacgccaaaagttaaatggtttttttcacctgatacgatagaatagtgacgtttagctctatatggaagtttatcactagaaacatcaactgtgatgtattggcctggtgtaaattcactaaagtcatattcttcagtttcaactgtaaatgatttaatgtcttcagattcttgtttaatattggtaattttgaatggtttaaaaccaatccacatcatttgatcataaatttctttttcaatttggatgaacacatccgcaataacaccatatgcttttgcccaagcttgaatcacagggtcatgttcttctaaacctgtcacgtcttggattgcttttaataaattttcccccacaattggataatgttcagcataaacttgtaatgcacagtgtttatatgcgactggcataatgactggtttaataacacttaagttatcgatattaaccgcagcggccattacagcttgtgctaatgctgaagattgcatgcctcgtttttggttcgtttgattaaacatgtttaaaagttcaggatgcgctttaaacatttttggataaaagattgacgtaatttctgtccctttctctttaagtaaaggcaccgtttgtttgataatgtctttctcttgttctgtaagcatgatactcctcctttaatctgtctattttgattattctactaaaaatttcgatattcaattaattggtttgagaaaatataaataaaatggcaaatttgataattgtatgacatttttaattttttaaatacttatcaataagcattgtgtacaattgtctgtttgcacaccgacgattgcgcgcatttatttgactaattcaaaaaacattgttgttttcttagaaaaaagtaaacatgataataaaaatgtgaaagtgtaaataatcactggcgaagtacgaagactaaagacacctaagatgtaatcgtatacaaattaaaaaggtgtaaaaattaaaataaaatgtgaaataaatcacaatttaatattgacccagtacttaatgcatgttacattttatatgtgaaataaatcacaaacttaaaagcggatgacacatgaccttttaagttatgcgttgaaaataaaagagatgtttatttgcttttgtatcgtcaataagcagcattaaactaacatatttgaagctacacgtatgttagtgaattaatcataagggagtttttgtaatgaacaaatttaaagggaacaaagttgtattaataggtaatggtgcagtaggttcaagctacgcattttcattagtgaaccaaagcattgttgatgaattagtcatcattgatttagacactgaaaaagttcgaggagatgttatggatttaaaacatgccacaccatattctccaacaacagttcgtgtgaaagctggcgaatacagtgattgtcatgatgcggatctagttgtcatctgtgctggtgctgcacaaaaacctggagaaacacgtttagatttagtatctaaaaacttgaaaatattcaaatcaattgttggtgaagtaatggcatcaaaatttgatggtattttcttggtagctacaaatcctgttgatattttagcgtatgcaacatggaaattctctggtttacctaaagaacgtgttataggttctggtacaattttagactctgcacgctttagattattgttaagcgaagcgttcgatgttgcgccacgtagcgtcgatgctcaaattattggtgaacatggtgacactgaattaccagtatggtcacacgctaatattgcgggtcaacctttgaagacattacttgaacaacgtcctgagggcaaagcgcaaattgaacaaatttttgttcaaacacgtgatgcagcatatgacattattcaagctaaaggtgccacttattatggtgttgcaatgggattagctagaattactgaagcgattttcagaaatgaagatgccgtattgactgtatcagcattattagaaggcgaatatgatgaagaagatgtttatattggtgttccagcagtcatcaatagaaacggtattcgcaacgtcgtagaaatcccattaaacgacgaagaacaaagcaagttcgcacattcagctaaaacattaaaagatattatggctgaagcagaagaacttaaataactttttataaaatctataccattccaaaaattgtaaaaccttacccaaaaaattgtataaagggctatttgatacaactatatgtgtcgagtagccctatttttaatgtagtgaaagtcgttgttgaaattaaattcaaatctggcacttaagctttaatcatagcattaagatgattgtctagcagaggcgatttgcgggctcactacagtgtatgatgaacttaatgcttcaaatgtaacattaaaaataaaagcaacgatgtcacttcttacttcgtacatcgttgccattagttctgttgatatttcggttagtcttaatccccgagcaattcttcaatttcatttttgataactgtaacgtgaggcccataaattacttgcacaccagtgccttgctggattacacctttggcaccagtactttcgagtaatactttatcgactttgtcattttgattaagtgtgacgcgtagtctcgttgcacaacagtcaacgatttcaatgttatctttgcctcccaaaccagcaacaatagtttgtgctctttcagtagcctcaacttgttgtgctgcagctttatcttctcgaccaggtgttttgaaattaaatttcgtaattaagaatctgaaaacgatgtaatacaaacagaaccacacaattccaataggtatgacgtataggtagtttgttttactattaccttgtagcacaccaaagagtaagaaatcgataaagcctccactgaaggtttgaccaattgtaatgttgaaaatgtctgccatcataaatgctaatccatcaaagaaggcatggattacataaagaataggtgcgacaaacaagaaactaaactctaaaggttcggtaatacctgttaaaaatgaagtgagtgcagcggataacattaaaccgccgacaacttttttatgttcaggtttagctgtgtgataaattgcaagtgcggcaccacataagccgaacatcatcgtaataaaacggcctgacataaagcgtgacacacctgaataatacttcgtcacatctggatcaccaagttgagcaaagaagatgttctgcgtaccttgaactaagtgccctttgacttctaaagtaccaccaagtgccgtctgccaaaacggtaagtaaaaaatatggtgtaaaccgagtggacctaacaatcttaagatgaagccataaacaaaagtaccgatggcacctgttttcgttacaaatccaccaacatgataaatgccggcttgtatgcttggccaaatgaaaaacatcaatacacctaaaaagattgcggcaaatgctgtgacaatagggacaaatctagagccaccaaagaaacctaaatacggtggtaataccactttgtgatatttgttgtgaagtattgcggtcataatacctgtgataatcccgccaaaaacaccggtttcaaccgtttgtataccgagcaccatgccttgtccattttgtgcaagctgatcttttgccaatgtgcccgtgatagttaataagccattcatagttgcgttcataattaagaaaccgagcagcgcagctaaacctgcagtacctttatcgcttctagataatccgattgcgacaccaattgcaaagatgaccggtaaattttggaaaacaatactacctgcagctgacattaatgtaaaaatattttgtaataaggtaatatctaaaatagggtatgctttaacggtgtttggattacttaatgcaccaccgatacccaacaatagacctgcagctggtaagattgcgataggtaacataaaggacttgccgaactgctgtgctttttcaaataaagatttcatcaacatccctcctaattattctcaatatagcttttgagaaatttaatatcaatatatattctgtgtatgaaaatatttttcataaaaattgtttgaatcatgtaacaatcatataaattgctgtttatattgttgtgaaaatgagttgacaaaagtcggtatagatatgtagacatcctatttttagcgaggtaggttgataaggcatatcggataaatttataagccataaaatagataaatagtgtttgtatccaaaaatatgagaaagttaaaactatttttcaaaataaacatgattcaccacataaataaatatacataagctatcgataacaacttaagaaaggtggatatataaatgaaaagaaagattattatggattgtgatccaggacacgatgatgcaatagcattaattttagcgggggcaattgacagtccactagagatattagctgtaacaacagtcgcaggtaatcaatcagttgacaagaatacgacaaacgccttgaacgtattggatattatgggacgccaagatatagcagtagcgaaaggtgcggataggccgttaattaaaccagctgcctttgcttctgaaatacatggggaatctggattagatggtccgaaactaccgtcgacaccatcacgtcaagcagttgcaatgccagcatcagatgtgattataaacaaagtgatgacgagtgatacacctgtaacaattgtagcgacaggtcctcttacgaatgtagcaacggcattgattcgtgagccaagaatcgctgagcatattgaatctattactttgatgggtggtggtacatttggaaattggacgcctacagcagaattcaatatttgggtagatgctgaagcagcgaagcgtgtttttgaaagtgggattactataaatgtgtttggtttagatgtaacacatcaagttttagccgacaatcacgtgattgaacgctttgaaagtatcaataatcctgttgcacagttcgtcgtagaattattgcaattctttaagaagacatacaagactcactttaatatggatggtggtccaatacatgatgcttgtacaattttgtatttgttacaaccagaattgtttacaatggtacccgttaatatcgacattgaacatcaaagtccactaacttatggcactatggctgtcgatttaaatcatgttacaggtaagcctgccaatgcttattttgctacagcagttgatgttgaagaagtgtggaacttgatagaccataagttacgtacatacgaataataatacttaattaaatagatacagttaaccctaaggcgcctgatataagcgtccttagggtttttatagtggattacattggtcatgacaatttgataatgattgagatatgtatgttaaaaatgcttcaaaaaacataaaacacaaaaatatatgtaaaaatttcaattgctttattttaaaagattaaaatcacaaaaaatatagatataattgaaatgttgttaaaacatcacaatgatgtacatgctcattttggaaatatgtgttcaaagtgtgtacatcgtgtgacgattgatgataaattgagctcagatgctcaaaggaggatcgaacatgaacggggataatcagcaaatactcagagaaattgtattgaatcctactattcatggtaaagaacttgaatcgatatttggtttgtctcgtagacaactaggatatcgcattcaaaaaatcaatttgtggcttgaacaagagggttatccaaaacttgaaagaacaagccaaggaaattttattgtaagttctgaaatcatgacgttattcaagcgagatgtatcggagcagcaaatgttaaacggcaacaatgtcatttttagcatagaaacacgtcgttattatttaatgctcatgctttttagtaaggaaaatgcaatgtctctaaaccatttttcaattgatttacaagtcagtaaaaatactgtcattcacgatataaatcatgtgaaagagcaattggaagatcatggtttgtcacttaagtattctcgaaagcatggttatgaaattgttggtgatgaatttgaagttcgccgtttcttcattaagttgattgatcaaaggttgaatcatgatattactaaaagtgaagttttaaaggcgctcaacttaacattcgaagatatcgcatatcaaaaagacaagatcaaacaggtagaacaatttttgaagagtcgctttatagacaaatcacttagttcattgccttatgtcctttgtgtgattcgtagacgaattcaaagtggtcatgtgatgaatccattaaatattaattatcagtatttgagggatacgaaagaatatcaagcaacggagattatgacgcaacatgagcctgatttgccagaagcggaaaagttatatttgacattacacttactttcaacaagtgtgcaatggactgatttgcaggaatcagataacatatcgaatttaacgatggccatcgctcaaatgattcaccattttgaacaaatcacttttattaacattgaagataaggagaaattatcacagcaactcttgttacatttaacgcctgctttttataggattaaatataacttaacggatcgtgatgaattaataaatcctttacaaggaaattatcaatccttatttcatatggtgaaacaatcatgtcaatcgttaactgaatatttcggaaaatcgttgcctgataatgaaatagcatatttaaccatgttgttcggaggtagtttgagacgtcaagatgaaaacttcgatggcaagataaaagctattatcgtgtgtacacaaggcacgtcagtatcacaaatgatgttatacgagttgcgaaacttatttccagaaattattttcttagatgcgatttcacttagaacatttgaaaattacacattagattatgacatcgtcttttcaccaatgtttgtcctaacacataaaaaattatttatcacaaaagtagctttatctgaaaatgagcaacgaaagttacgtaaagaagtgatgaagtacattaataaggaatcggctgacattgataaggaaataaacaagttaatggcattaattgaacgcacaacgacagttaatgacattacagaactacgtgatggtttagaagattttattgccaattataattcaatttcaaccattaatggatcgattgtcacacaaaataagacattagatttagctgacttgataccggcaaggcacgtgaaaagaatgcatcatgttgaaaatattgatgaagctattgctaaagcaagtgatgtgttagttgctaatcattttattgatattaaatatattcatgagatgcaacaggtatttgatgattcgtatatggttatcatgcaaaatattgctattccacatgcatactctgaaaagcatgtacataaaacagcgatgagtatgttgatattacaagaaccaatatacatgtcagatggcacagcaatccatattattgtacctattgctgctgttgataaagtgacacacttaagagcgttactacaattgagagatgtggcgcaagacaatgacgcaattaagcgcatcatacaaagtcgcaaaaattctgatgtaaatgagattttaaaaaattattcaaataaagaagcgagggaaaatggatgggacagcaattagtgcataaagaaaatataatgctcaatttgtcggcaactgataaagaatccgtattgtcacaaatgtcagatgtgttatttcaaaatgggttcgtgaagtcaacgtttaaagatgcagtcatcgacagagaaaaagaatttgctactggtttaccaacacatctatgttcggtcgctataccgcatacagatgtcgaacatattaaccatagaacgataggtgtggctgttctagaaaaagaggtgccgtttattgaaatgggaacacttgatcaacagacagaagtgaaaatcgtttttatgttagcgatggataaagtagatgatcaacttaagttgttacaacagttgatgcaaatttttcaaagtgaagaaaaattggagcagattctgcgaacgaaagatgaaacgattttagcaacactaatcaatgattatttggaatataactaaaaattaattggaggaattgaaaatgaaacaagtattagtagcgtgtggtgcaggtattgcaacgtcaacagtagtaaataatgcaattgaggaaatggcaaaggaacacaatattaaagtagatattaaacaaatcaaaattacagaagttggaccttatgaagacactgcagatttattagttacaactgcaatgacaaagaaagaatataaattcccagttatcaacgcacgtaatttcttaactggtattggtattgaagaaacaaaacaacaaatcttaacagagttacaaaaataacggaattgatatgtaacgtgggtcaataacatataaatatatgcaaattgcatataaatgactatcacgacaaatgattgttgatgacatagaaacgcagtgactgtaattcaaagggactgcagtcgaatgtagcaagggttgtcgttgaaatgaccgtaacgtcaaatgtaatcacaatcggaaagtatcgtgacaatgcatatataacagggagggtttaaatatgagttacttcactgattttgtaaggggatttttagatttaggtgcaactgttattttaccggttgtcatattcttgcttggcctattctttaggcagaaaattggagcggcatttaggtctggtttaacaataggtgtggcttttgtagggattttcttagtcatcgatttattagttaaaaatttagggccagcagcacaagcgatggttaaaaatttaggcgtcagtctgaatgtgattgatgtaggttggccagcaacatcatctatcgcttgggcatcatctgtcgcagcatttattattccactcggaatcatagttaacgttgtattgctagtaactaaagtgacaaagacgatgaatgtagatatttggaatttttggcattatacgtttacagcagcaatggtttatgccgtatcaggcagtatttggcaagcgttattagcagcagttattttccaagttatctgtttgaaagtagcagattggacagcaccgatgatgagtgagttctttgatttaccaggtgtatcgattgcgacaggaagcacgatttcttatgcaccaggtatttacttagttaaattgttacaaaaagtacccggtctgaataagttagatgctgatcctgaaacaattcaaaaacgttttggcgcatttggagagtctatatttgtcggcttaattttaggtttaggtattggtgtgttagcaggttacaaacctggagacatcattaatttaggaatgtcaatggctgcagtaatggtattaatgcctagaatggtaaaaatcttaatggaaggtttaatgccagtttcagagtctgcaagaacatggctaaataaacgttttggcgaacgtgaaatttatattggattggatgcggctgtagcattaggtcatccagcggttatttcgacagcattaattttagtacctatcactgttttattagccgttattttaccaggaaaccaagtactaccttttggtgacttagcaactataccatttgttgtcgcgtttattgttggtgcagcaagaggaaacattattcattctgtcattgtgggtacgattatgattgcaatttcattatatattgcaacagacgtagcacccattttcacagatatggcgaaaggtacgaatgtacaaatgccaaaaggttcatctgaaatttcaagtattgatcaaggtggtaatatcgttaactatcttatctttaaactatttagtctattcaattaaaaatcgaggtgtttgtggtgaaagctttagtaaaaacaagagaaggacatggcaacttagaacttcttgataaagaagttgcaacaccgctagatgataaagtaaagattaaagtacattatgcaggaatttgtggcacagacattcatacttatgaagggcattataaagttaattttccagtgacattaggtcatgaattttctggtgaaatcgttgaagttggagcagacgttaaagattttaaagttggtgaccgtgtcacttctgaaactacattctatgtttgtaatgagtgtgaatactgtaaatcaaaagactataatttatgcaaccatcgaaaaggtattggaacacaagttgatggcgcatttactaattatgtcattgcacgtgaagaaagtttgcatcatattccagacgaagtatcgtatcagtctgcagctatgacagaaccattagcatgtgcacatcatggcgtttctaagattcaagtgaactctggcgatgtagcagttgtaatgggacctgggccaatcggattacttgtagcacaagtgttgaaaagtaaaggcgcaactgttgtggtaactggattggacaatgacaaagtcagattagataaagcagaagcattgcacatggattatgtagtcaatttacaacaaacagacttaaaaacgtatatcaatggaattacagacggttacggtgcagatgttgttgttgaatgttcaggtgcagttccagcagcacgacaaggtttagatattatacgcaaaaaaggtttctacagtcaaataggtatttttaaggatgctgaaattccatttgatatggaaaaagtgattcaaaaagaaataacagttgttggtagtagaagtcaaaagccagcagattgggaaccttcattgcaacttatggcggatggtttagtaaatgctgaagctttggtgacaaaaatatatgatatttcgaaatgggacgaggcgtatcaacatttaaaatctggcgaaggtattaaagcattacttaagccgctcgatttagatgaaaatgaaggagagaattaatatggtagaatcaatgctaacttttatgcttgggccattaagacaaatcactgatttttatatggaacatttactcgtaagtaattccatcgtcattgcaggttattttgcgacaggtatttttaaaaagaaaaaagttgtgaattaaatcaaatttgaggtgatttacaagtgaaagcattgaaattatatggcgtagaagatttacggtatgaggataatgaaaagccagtcattgaaagtgcgaatgacgttattgttaaagtacgagcgactggcatatgtggttcagacacgtcacgatacaaaaaaatggggccatacattaaaggtatgccatttggtcatgaattttcaggtgtagtagatgccattggaagtgatgttacgcatgttaatgtgggcgacaaagtgacaggttgcccagcaataccttgttatcaatgcgagtattgtttgaaaggtgaatatgcacgatgtgaaaagttattcgtcattggctcatatgaacctggatcgttcgcggaatatgtcaaattgccagcgcaaaatgttttaaaggttccagacaatgttgattacattgaagcagcaatggttgagccatcagccgttgttgcgcatgggttttataaatcgaatatacaacctggtatgactgttgcagtaatggggtgtggcagtataggtttgttagctattcaatgggcacgaatatttggtgctgcacatatcatcgctatagatatagatgcgcataaactagatattgcaacatcattgggcgcacatcaaacaatcaattcaaaagaagaaaatcttgagaaattcatcgaaaatcattacgccaatcaaatcgatttagctatagaatcatcaggtgctaaagttacgattggtcaaatattgacgctacctaaaaaaggtggcgaggtggtattactcggaataccatatgatgatattgagattgatcgcgttcattttgaaaaaattctgcgtaacgagttgacagtatgtggctcttggaactgtttgtccagtaattttccgggcaaagagtggacggcaaccttacattatatgaagacgaaagatattaatgtaaagcctattatttctcattttttaccgttagaaaaaggcccggagacatttgataaattagttaacaagaaagaacgatttgataaagtcatgtttacgatttattagtatgcacctttgaggacgaaaacgctggtatagttatagctatgaaagtgcgaatgccgtctggtctacagatactatcgaaataattcatcttcgaatatacgttgataaatagccggtttacttgtgtgaaatatgcttgtgaatcggttgttttgcattttgtatacttaaaatgagatggcaatatttgataatttttaaagtgaaaatcaagtacagccacttaataagataaatttattataatatatggtaaaatgatggcagtaataatgaatttgaaaaagagtaaacattaatacctttaacaatttaatatcgtcagagttaatgattaactgcatggcaaaacaacttagaatggtcagttacaaaaatacatttttataaaaaattatcacactattgtgacaactatctttggattaataaaagaggcaagtgagcaataggttaggcttatgtgcgggcataggtcagtaatgtataaatggaaatgatgtaatgacagaatggaggacaacatgatttatgcaggtattttagcaggaggtattggttcgagaatggggaacgtgccattaccaaaacaatttttagatattgataataaaccgattttaatccatacaattgagaagttcattttagtgagtgaatttaatgagattattatcgcaacgccagcacagtggatttcccatacacaggatattttaaaaaaatataacattacagatcaacgtgtcaaagtagttgcaggtggtacggatcgaaacgaaacaattatgaacattatcgaccatattcgcaatgtaaatggaattaataatgatgatgtgattgtaactcatgatgccgtaagaccatttttaactcaacgtattattaaagagaacattgaagtagcagcaaaatatggtgcagtagatacagtcattgaagcaattgatacgattgtaatgtctaaagataaacagaacatacacagtatccctgtaaggaatgaaatgtatcaaggccaaacaccacaatcatttaatattaaattattacaagatagttatcgcgccttaagtagtgaacaaaaagaaatcttatcagatgcatgtaaaataattgtcgaatctggacatgcagttaaattggtacgtggagaactatacaacattaaagtgacaacaccgtatgatttaaaagtagcaaatgccattattcaaggtgatattgccgatgattaatcaagtatatcaactcgttgcaccgagacagttcgacgtcacatataataatgttgatatttatggtaatcatgtcatcgtaagacctttatacttgtctatttgtgcagctgatcaaaggtattacacaggtcgaagagatgaaaatgtactgcgcaaaaaattgccaatgtcattagttcatgaagctgttggtgaagttgtattcgatagtaaaggagtatttgaaaaaggtacgaaagtagtaatggtgccgaatacacctacagagcaacatcatattatcgcggagaattacttagcctctagttattttagatctagtggttatgatggttttatgcaagactacgttgtgatggcacatgatcgtatcgttccgctgcctaatgacattgatttgagtacgatttcatacacagagttagtgtcagtaagttatcatgctatacaacgatttgaacgtaaatctatacctttgaaaaacagctttggtatttggggtgatggtaacttaggttatattactgctattttgctacgtaagttgtacccagaagctaaaatttatgtatttggtaagacagactataaattaagtcatttttcatttgtagatgacatctttacagtaaatcaaataccagatgatcttaaaattgatcatgcatttgaatgtgttggaggtaaaggaagtcaagttgcacttcaacaaatagttgaacatatttcaccagaaggcagtattgctttgttaggcgtaagtgaattacccgtggaagtgaatacacgattagtacttgaaaaaggattaacgttgattggtagtagtcgaagcggctctaaagattttgagcaagttgttgatttatatcgtaagtacccagacatagttgaaaagttagcattattaaaaggacatgaaattaatgtatgtacgatgcaagatatcgtccaagcgtttgaaatggatttatcgacatcttggggaaaaacagtattgaaatggacgatttaataaaccgatgggggaataacaatgacaaaaacgaaacaagcaatacatattgataacatatactgggaacgtgttcagttatatattgaaggacatagtgaaggtgtcgatttaacatcaggacaatttgttctgaggaatttaaccgaaacaaaaacattagaagcaaatgaaatgaaaatagacggtaatacatttatatgtagattcaacgtcgcaatattagacgatgggtattatttaccaatggataaatatttatttgtttatcatgaccagttagagtatattggacaacttaatccaaatattattgatcaagcttatgcggcattaaatgaagagcaaattgaagaatacaatgagctgactacacaaaatggaaaagtgaactatttattagcgtatgatgctaaagttttccgtaaaggtggcgtatcacaacatacggtctataccattactccggaaatagcaagtgacgttaacgaatttgtatttgatattgaaatcaccttacctcaagagaaatcaggggtcattgcgacaagtgcacactggcttcataaacaaggtcataaagcttcatttgaaagtagaagtttcttatttaaagctatttttaatattacaaagttactacatattaaaagaagcaaaacaatattattcacatcagattcgcgtccgaatttatcagggaatttcaagtatgtatatgatgagttactacgccaaaaagtagattttgattatgatattaaaacggtatttaaggcgaatattacggatagacgcaaatggagagacaagtttagattgccatatttacttggtaaggccgattatatttttgttgatgatttccatccattaatttatacggttcgctttagaccatcacaagaaattattcaagtgtggcatgctgttggtgcctttaaaacagttggctttagtcgtacaggtaaaaaaggtggtccgtttatcgattcattaaaccatcgtagttacacgaaagcatatgtttcatcagaaaccgatattccattttatgctgaagcatttggaattagagaagaaaatgttgtaccaacaggtgtaccacgtactgatgtactatttgatgaagcttatgcaacacaaattaaacaagagatggaagatgaattgccaattataaaaggtaagaaagttattctattcgcaccgacatttagaggtaatggtcacggtacggcacattatccattttttaaaattgattttgaacgtttagcaagatactgcgagaagcataatgcagttgtgttattcaaaatgcatccgttcgtaaaaaatagacttaatatttcacgtgaacatagacaatactttatcgatgtgtcagatcatcgtgaagttaacgatattctctttgttacagacttgttgattagtgattattcatctttaatatatgaatatgcagtatttaaaaagccgatgattttctatgcatttgacttagaagattacattacgacgcgtgatttctatgaaccatatgaatcatttgttccaggtaaaattgtacaatcctttgatgcattaatggatgctttggacactgaagattatgaggttgaaaaagttgtaccattcttagataaacattttaaatatcaagatggtcgctcaagtgaacgtttagtcaaagatttgtttagacgctaatgttggcatatattacttgccatgcaaatgagtcataaggcatagttttcaagaagggttctgacaatgaagtgagcaacatgtcatgatgagaagcaggactatacaatgagaataaccttttgatttttcatgcataaggcgattcaatcaaaagcaatcaccttccaactgaattgtcattttgtaaaataaaataatcgatccaatcgttatctaattcataaatgtgtaaacacatacgttatgaatggataacgattttttgttatgttaaagtggtacattaatcatgtatttcgtatgataattaacgacaagtgtaatggttaaatgtattttatgatgaaatgctataataggcatggttacaatgagcttgctcatacatattaatataattacaaaaacacgtcggaggtacgacatgattaaaaatacaattaaaaaattgatagaacatagtatatatacgacttttaaattactatcaaaattgccaaacaagaatctaatttattttgaaagctttcatggtaaacaatacagcgacaaccccaaagcattatatgaatacttaactgaacatagcgatgcccaattaatatggggtgtgaaaaaaggatatgaacacatattccaacagtacaatgtaccatatgttacaaagttttcaatgaaatggtttttagcgatgccaagagcgaaagcgtggatgattaacacacgtacaccagattggttatataaatcaccgcgaacgacgtacttacaaacatggcatggcacgccattaaaaaagattggtttggatattagtaacgttaaaatgctaggaacaaatactcaaaattaccaagatggctttaaaaaagaaagccaacggtgggattatctagtgtcacctaatccatattcgacatcgatatttcaacatgcatttcatgttagtcgagataagattttggaaacaggttatccaagaaatgataaattatcacataaacgcaatgatactgaatatattaatggtattaagacaagattaaatattccattagataaaaaagtgattatgtacgcgccaacttggcgtgacgatgaagcgattcgagaaggttcatatcaatttaatgttaactttgatatagaagctttgcgtcaagcgctggatgatgattatgttattttattacgcatgcattatttagttgtgacacgtattgatgaacatgatgattttgtgaaagacgtttcagattatgaagacatttcggatttatacttaatcagcgatgcgttagttaccgactactcatctgtcatgttcgacttcggtgtattaaagcgtccgcaaattttctatgcatatgacttagataaatatggcgatgagcttagaggtttttacatggattataaaaaagagttgccaggtccaattgttgaaaatcaaacagcactcattgatgcattaaaacaaatcgatgagactgcaaatgagtatattgaagcacgaacggtattttatcaaaaattctgttcattagaagatggacaagcgtcacaacgaatttgccaaacgatttttaagtgataacttaaaaacaataaaaaattataaattaattagttaagtgatataaataataaacgaaatgtttgcttgtatgttattatttgtgtatgaaaacgtctgatataatgtaatataggtttaaacaaaatatgctaaaatataagcaaaatatgtataattttaagtaatacacagacatttagagttttgattttaaaatgagttttcaattggaaaatgcaacgaaatttaaataattaaatatagatatagttgaatggaggaagtattttatgaaatacgctggtattctagctggaggtataggctcaagaatgggtaacgtacctttacctaaacaatttttagatttagacaacaaaccgattttaatccatacattagaaaaatttattttaattaatgattttgaaaaaattattatcgcgacgccacaacaatggatgacgcatacgaaagatacacttagaaaattcaaaatttctgatgaaagaattgaagtcattcaaggtggtagcgatcgtaacgatacaattatgaatatcgttaaacatattgaatcaacaaatggtattaacgatgacgatgtcattgtgacacatgatgcagttagaccatttttaacgcatcgtattattaaagaaaatattcaagctgctttagagtacggtgcagtagatacagtgattgatgctatagatacgattgttacatctaaagataatcaaacgattgatgcaattccagtgcgtaatgaaatgtaccaaggtcaaacacctcaatcgtttaatattaatttattaaaagaaagctatgcacagttgagtgatgagcaaaagagtattttatctgatgcttgtaagattattgtagaaacaaacaaaccggttcgacttgtaaaaggtgagttatataacattaaagtaacaacaccttacgatttaaaagtagcgaatgctattattcgaggtggtattgccgatgattaatcaagtatatcaattagttgcacctagacaatttgaagttacgtataacaacgtagatatttacagtgactatgtcattgtacgtcctttatatatgtcaatttgtgctgccgatcaaagatattatactggtagccgtgatgagaatgtcttatctcagaaattgccaatgtctttaattcatgaaggtgttggtgaggtcgtatttgacagtaaaggtgtgtttaataaaggtacaaaagtagttatggtaccgaatacgccgacagaaaaagacgatgtcattgctgaaaactatttaaaatcgagctacttcagatcaagtggacatgatgggtttatgcaagattttgtgttgctaaatcatgatagagctgtaccactacctgatgatattgatttaagtattatttcatatacagagcttgtaacagtaagtttgcatgctattcgtcgttttgaaaagaaatctatttcaaataaaaatacatttggtatttggggtgatggtaacttaggttacattacagccattttattacgtaaattatatccagagtctaaaatatatgtctttggtaaaacagattataaattgagtcacttctcatttgttgatgatgtcttctttattaataaaatacctgaaggcttaacatttgatcatgcatttgagtgcgttggtgggcgtggtagccaatcagcaataaatcaaatgattgattatatttcaccagaaggaagcattgcactgttaggtgtaagtgagttcccagtagaagttaatacacgtctagtattggaaaaaggactaacgttgattggtagtagtcgaagtggttcaaaagatttccaagatgttgtagacttatacattcaatacccagatattgtagataaattagcgttgttaaaaggtcaagaatatgaaattgcaacaattaatgatcttacagaagcttttgaagcagacctgtctacatcttggggtaaaacagtattaaaatggattatgtaaatagaaaaggatgaattaacgttggttaaaagtaagatatatatagataaaatctattgggaacgtgttcagttattcgttgaaggacatagtgaaaacctagatttagaagatagtaattttgtattaagaaatttaactgagacacgtacaatgaaggcgaatgatgtcaaaatagatgggaatcaattcgtttgtcgtttcaatgtagctatcttagataatggttattacttacctgaagataagtacttattagtgaatgagcaagaacttgattatattgcacagttaaacccagatgtgattaatgatgcatatcaaaatctaaagccagaacaagaagaagaatacaacgaattagaaacacaaaatggtaaaatcaatttcttattgcagacttacctaaaagaatttagaaaaggcggcatttcgaagaaaacggtttatactgttacacctgaaatttctagcgatgttaatgaatttgtccttgatgttgttgtaacgactccggaagttaaaagtatttatatcgttcgtaaatataaagaattacgtaagtatttccgcaaacaatcatttaatacaagacaatttatttttaaagcgatatttaatacgacgaaatttttccacttgaaaaaagggaatacggtgttgttcacatcagactctagaccaacgatgtctggaaactttgaatacatctataacgaaatgttacgtcaaaatttagataaaaagtatgatattcacactgtttttaaagcgaatattacagatagacgtggcatcatcgacaagtttagattgccatatttacttgggaaggcagactacatctttgttgatgactttcacccattgatttatacagtgcgttttagacgttctcaagaagttattcaagtatggcatgccgttggtgcctttaaaacagttggctttagtcgtactggtaaaaagggtggaccatttattgattcattaaatcatcgtagctatacaaaagcttatgtatcatctgaaaccgatattccattctacgctgaagcatttggtattaaagagaaaaatgtagtgcctacaggtgttccacgtactgatgtactatttgatgaagcttatgcgacacagatcaaacaagagatggaagatgaattaccaattattaaaggtaagaaagtcattcttttcgcaccaacatttagaggtagtggtcatggtacagcacattacccatttttcaaaattgatttcgaacgtttagcaagatattgcgaaaaaaataacgcggttgtattatttaaaatgcatccatttgtgaaaaatagacttaatattgcagacaaacataaacaatattttgttgacgtttctgactttagagaagttaatgatatactgttcataacagatttattaattagtgactattcatctttaatatatgaatatgcagtatttaaaaagccaatgattttctatgcatttgatttagaagattatattacgacgcgtgatttttatgaaccatatgaatcatttgttccaggtaaaattgtgcaatcatttgacgcattaatggacgccttggacaatgaagattatgaaggagaaaaagtcattccattcttagataaacattttaaatatcaagatggccgatcaagtgagcgtttagtcagaaatttatttggtagctaagtttatatagtagtcaaagtgggagaggtataatgatgaaattttcagtaatagttccaacatacaattcagaaaagtatataacagaattacttaatagccttgcgaaacaagattttccgaaaactgaatttgaagtggttgtagttgatgactgttcaacagatcaaacgttacaaatagttgaaaagtatcgcaataaattgaacttgaaagtaagtcaactcgaaacaaattctggtggtccaggtaaacctagaaatgtggcgttaaaacaagcagaaggtgaatttgtattatttgtggactccgatgactatataaacaaagagactttaaaggatgcagcagcatttattgatgaacatcactcagatgtcttattgattaaaatgaaaggtgttaatggtcgtggtgtaccacaatctatgtttaaagaaacagcacctgaagttactttgttaaattcaagaattatctatactttaagcccgactaaaatctatagaacagcattactaaaagataatgacatttattttccagaagaattaaagagtgcagaagatcaattatttacaatgaaagcatatttgaatgcaaatcgaatcagtgtgttaagtgataaagcgtattattatgctacaaagcgtgaaggtgaacatatgagtagtgcgtatgtttcacctgaagacttttacgaagtcatgagattgattgctgtagaaatattaaatgcagatttagaagaagctcataaagatcaaatcttagcagaatttttaaatcgtcattttagtttttctcgtacgaatggcttctcacttaaagttaaacttgaagagcaaccacaatggattaatgctctaggagactttatacaagcagttccagaacgtgtagatgcattggtgatgagtaaattacgaccattgttgcactacgcgagagcgaaagatatagacaactatagaactgtagaagaaagttaccgtcaaggtcaatactaccgttttgatattgtagatggtaaattaaacattcaattcaatgaaggcgaaccatactttgaaggcattgatatcgctaagccaaaagtgaaaatgacagcatttaaatttgataatcataaaattgttacagagctaacgttaaatgaatttatgattggcgaaggacattatgatgtcagacttaaattacattcacgaaacaagaagcacacaatgtatgtacctttaagtgtcaatgcgaataaacaatatcgttttaacattatgttagaagatattaaagcgtatttacctaaagaaaaaatttgggatgttttcttagaagtccaaataggtacggaagtatttgaagtgcgtgttggtaatcaacgtaataaatatgcatatactgcagaaacaagtgcattaattcatttaaataatgatttttatagattaacaccgtatttcacaaaagactttaataacatttcgttatactttacagctattacattaacggattcaatctcaatgaagttaaaaggtaaaaacaaaatcattttaactggtctggatcgtggttatgtatttgaagaaggtatggctagtgtcgtgctaaaagacgacatgattatgggaatgttaagccaaacgtcagaaaacgaagtggaaatcttacttagtaaagatattaagaagcgagacttcaaaaatattgttaagttaaacactgcacatatgacttactcgctaaaataaataataaatgccctcaaatctatgtgaactaacataatttgagggttttattttgctatttatgaaatgattatgacatttccctgattttcattttcatatacattaaattgtatacactgaaaatgaggaggtcgtctataatgataaataaaaatgacatagtagcagatatagtaatagattatccgaaagcagcagatatttttagaagcgtaggtatagacttttgttgcggtggacaagtaagtatagaagcagcatccttagaaaagaaaaatgtagatttgaacgaattattacagcgtctcaatgacgttgaacaaacgaatacaccaggttcgcttaaccctaaatttttaaatgtttcgtcacttattcaatatattcaagcagcatatcatgaacctcttagagaagaatttaaaaatttaacaccttatgtgacgaaattatcgaaagtacatggacctaaccatccatatttagtcgagttaaaagaaacatatgatacatttaaaagtggcatgttagagcatatgcaaaaagaagatgatgttgattttccaaaactaattaaatatgaacaaggtgaagtagtaaacgatattaatacagtgattgatgatttagtatctgatcacattgcaacgggacaattgttagtgaaaatgagcgatttaacatctagctatgaaccaccgatagaggcatgtggtacgtggcgactcgtttatcagagattaaaagcacttgaagtgttaacacatgagcatgttcatttagagaatcatgttttatttaaaaaagtatcataaataacgcgattagaaactgttggcaaagtaatgtcagcagtttttcgctatacttaacagaaatttagtgatatgaacagcattatttgaaaagaaaaatggtcaacttagcataaaaattgatatgaaaatttaatggtatagataattaaatagtagcgtgtttttttaataatttattcatgaattttacatgcactattatgataaaataaacataattataattcactgaggtgctatcgtgctatcgctaacaatgttattacttgagcgtgtaggtttaattattattttggcctatgtgttgatgaatattccatattttaaaaacttaatgaatcgtcgacgtacatggaaagcacgttggcaattatgtattattttcagtttgtttgccttaatgtctaatttaactggtatcgtcatcgatcatcaacatagtttgtcaggaagtgtgtacttccgtttagatgatgatgtatctttagctaacacacgtgtattaacgataggtgtcgcaggattagttggtggcccttttgtaggtctatttgttggcgttatttcaggtattttcagagtgtatatgggtggggcggatgcacaagtttatcttatctcatctatatttatcggtataattgctggttattttggcttacaagctcaaagacgcaagcgttacccgagtattgcgaaaagtgccatgattggaattgttatggaaatgattcaaatgttgagcattttaacattttcccacgacaaagcatatgcggttgacctcatatcattaattgcactaccaatgattattgttaatagcgttggtacggcgatttttatgtctattatcatttcaacattaaagcaagaagagcaaatgaaggctgttcaaacacatgacgtactgcaattgatgaaccagacattgccgtattttaaagaaggattgaatagagaatcggcacagcaaattgcgatgattattaaaaatttaatgaaagtatctgccgtagcaattacaagcaaaaatgaaatcttatcgcatgtaggtgcaggtagtgatcatcacataccaacaaatgaaatattaacaagtctgtctaaagatgtattgaaatcaggaaagttgaaagaagtgcatactaaagaagagattggttgtagtcatccgaattgcccgcttagagcagctatcgtgataccacttgagatgcatggttctatcgtcggtacattgaagatgtattttacaaaccctaatgatttaacttttgtggaacgtcaacttgcagaaggattggcaaatatttttagtagccaaattgaacttggtgaagccgaaacgcaaagtaagttattgaaagatgctgagattaagtcattacaggcacaagtgagtccacattttttcttcaattcaattaacacgatttcagctttagttagaataaatagcgaaaaggcacgagagttactattagaattgagttattttttcagagcgaatttacaaggctcaaagcaacatacgattactttagataaagagttaagtcaagtgcgtgcatacttatcactcgaacaagcacgttatccaggaagatttaatatcaatattaatgttgaagacaaatatcgcgatgtgcttgtaccaccatttttaattcaaattttagttgaaaatgccatcaaacatgcgtttacgaatcgaaagcaaggtaacgatattgacgtgtcagtgattaaagaaactgcaacacatgtacgtattattgtacaagataatggtcagggtatttctaaagataaaatgcatttgttgggagaaacatctgtagaatcagaatctggaactggtagtgctttagaaaatttaaacttacgcctaaaaggattatttggaaaatccgcagcattacaatttgaatcgacatcgagcggtaccactttttggtgtgtacttccttatgaaagacaagaggaggaataaatatgaaagcattaatcatagatgatgagccattagcacgtaatgaattaacatatttattaaatgaaattggtggttttgaagaaattaatgaggcagaaaatgtaaaagaaacattggaagcactactgatcaatcaatatgacattatatttttagatgtcaatttaatggatgaaaatgggatcgaattaggagctaagattcaaaagatgaaagagccacctgcgattatttttgcaactgcacatgaccaatacgcagtacaggcatttgaattaaatgcgacagactatattttgaaaccgtttggtcaaaaacgtattgaacaagcagtcaataaagtgcgtgcgactaaagccaaagatgataataacgcaagtgcaattgcgaatgatatgtcggcgaattttgatcaaagcttacctgttgaaattgacgataaaattcacatgttaaagcaacaaaatattattgggattggcacacataatggtattacaaccatacatacaacgaatcataaatacgaaacaacagagccattgaatcgttatgaaaaacgattgaatcccacttattttatacgtattcatcgttcatatattattaacacgaaacacattaaagaagtgcaacaatggtttaactacacttatatggtaatattgacaaatggtgtcaagatgcaagttggacgttcatttatgaaagattttaaagcgtcgataggattactttaacagtaatccttttttttatgcattttacctatgatattttgtatttcggactaaaaatcacgcaaatcgaagtgagccatctatactttagttaaatcaaacgtaggaggcaatggtcgtgaaacaacaaaaagacgcatcaaaaccagcacacttttttcaccaagtcattgtaattgctttagtactctttgtatcgaaaataattgaatcatttatgccaattcctatgcctgcatcagtaatcggtttagtattattatttgtattattatgtactggtgctgttaagttaggcgaagtcgaaaaagtaggaacgacactaacaaataacattggcttactcttcgtaccagccggtatctcagttgttaactctttaggtgtcattagccaagcaccatttttaatcattggactaataatcgtctcaacaatactattacttatttgtactggctatgtcacacaaattattatgaaagttacttcgagatctaaaggtgacaaagtcacaaaaaagatcaaaatagaggaggcacaagctcatgattaaccacttagcactaaacacaccttacttcggaatactgttatccgttataccatttttcttagcgaccatattatttgaaaaaactaatcgtttcttcttattcgcaccgctatttgtcagtatggtatttggtgtggccttcctctatttaacaggcattccgtataagacttacaaaataggtggagacattatttacttcttcttagaaccggcaacaatctgttttgcgattccgttatataaaaagcgtgaagtgcttgttaaacattggcatcgtatcataggaggtattggtatcggtacagttgtagcgttattaattattttaacttttgcgaagttagcacaatttgccaatgatgttattttatcaatgttacctcaagcagcaactacagcgattgcgttaccagtatcagctggtatcggtggtataaaagaattaacatcattagcagttattttaaatggtgtcattatttatgccctaggtaataaattcttgaagcttttccgaattactaaccctattgcccgaggattagcacttggaacaagtggtcacacattaggtgtagcaccagccaaagaattaggacctgtagaagaatcaatggcaagtatagctttagtgttagttggtgtagttgttgtagcagttgtgcctgtctttgtagcaatattcttctaaaacgaaaaacctaagcaagataatagcaatttgagccattgttattatcgtaaaaaaacgtctatactccagtttataactgggatatagacgtttttatgtatttattactttttactaggaatataaaactgtgcatgacgataatgaaatacgatgtcagacgaatcaaagggtttgccagtcattgtataaaaagtctggtggtaacgtaaacatggttcacctgtagacaattgtagtaatgaagcttcacttgaagtgagtttatctacattaaagaaaatatctgaaaaaccaatacgaagtttcatgtttgattctaaataatcgaagatagagcccttagcaatatcatcatttaaatatttcacgatttctttatgataataagaatattcgatacataaaacatcatcgtccacgaatcttaatcgctctaaatagtagacggtatcatctgcatttaattggagttcatcttgtacagatttaggtggcgttgccatctccttaaaaacaagtaccttacttgtcattcgatgttcacctaaacttttagagaaaccattagtcttaaagacgttgatacgattggcatctgcaatatttctcacataaataccactgccttgtgcttgatagatcaaaccatcttgttccaataagcctaatgctttaatgatagtactcttacttacttgataacgttcttttaattgcgtcacgtttggcaatttatcaccgggtttgaaattagattgatgtataaacgcattaagttgcttagcaatatgttcatactttaacaatattctgtcctcgtttcactttgtctgtaattattatagcacaaaatattataattgtatcggcgtttacaaattgaaccggtacaattataattggaggtaagtaaatacattttcattctactatcaagttgagggggtaatatttatgagcaataaatataaagaacaagcccaagacattcttacagctgtaggtggtgtcgaaaacattgttgatgcaacgtatgatacgaagtgcattacaattcatatgcaacatacaattccttctacagcaaatgaagtgaaacaaatagttgatgtgacatctgtagcagaaaatgatgcgcagttagtcataaaattaaatggaaatgtcgatgaagtgtatcagcaattacagcgattaattaagaatgctaatgtcgaagagagtgagaatactgacaatattaatagccaagatacaagttatacacctcaagtaaaagtaacaacaccaattttagtgaaagcaccaatcgctggtcgtcgtattttacttaaagaagtaagagattcaatttttagagagaaaatggtaggtgaaggcttagcaatcaaagctcatgaagaatccaaagtaatcgcaccgttcaatggtttaatatctatgattgtaccaactaagcatgcagttggtattcaatcagaagacggtgtggacatagtcattcatattggcgtgaatacagttgacttggaaggtaaagggttcaagtgctttgtaaagcaaaatgatcatgttgaagcagggcaaacgttgttgcaattcgaccagcaatatatacaacaacaaggctacaatgctgacgttattgtcgttattagcaactctgccgatttaggaaaagtagaactgacaatgaatgaaatcattacgactgaagatgttatttttaaaatatttaaaaactaggagtgtgttgtaataatgacaaaattaccgcaaaattttatgtggggtggcgctcttgccgcaaatcaatttgaaggtggatatgaaaaaggtggtaaagggttaagtgtaattgatgttatgacgagtggtgcacatggcaaagcacgtcagattacagaatctatagacctcaatcactattatccaaatcatgaaggtattgatttttatcatcgttataaggaagatattgccttgtttaaagaaatgggattgaaatgtttacgtacgtcgattgcgtggacacgtatctttccgaatggggatgaagatgtgccaaatgaagaaggacttgccttttatgatcgtatctttgatgaattaattgcacaaggtattgaacctgttgtgacgttatcacattttgagatgccacttcatttagcgaaacattatggtggatttagaaatagagaagttgtcgattattttgtgcattttgcgcgtgttgtatttgaaagatataaagataaagttacatattggatgacgtttaatgaaattaataatcagatggacacatcaaatcctatctttttatggacgaattctggggtagcattgacagaaaatgataatcctgaagaagtcttgtatcaagtagcacatcatgaacttttagccagtgctttagcagttcgtcttggtaaagagattaatccgaagtttaagattggaacaatgatttcacatgtacccatttatccatattcgtgtcatccgaaagatatgatggaagcacaaattgcgaatcgcttacgtttctttttcccggatgtccaagtgagaggttattatccaagctatgctaaaaaaatgttggcacgaaaaggatatgatgttggatggcaagaaggggacgacagtattttacagcagggcacggttgattatattggctttagttattacatgtctacggctgtaaaacatgatgttgatactacagttgaaaacaacatcgtcaacggtggtttgaatcattctgtggagaatccgcatatcgcaacgagtgattggggttgggcgattgatccagatggcttaagatatacattgaatgtgttatatgatcgttatcagttaccactttttattgtggaaaatggttttggtgcagttgatgaagtggtagatggacatattcatgatgattatcgcattgaatatttaaaagcacatattacagcagcgatagaagcagttgatcaagatggtgtagatttaatcggttatacaccgtggggaatcattgatattgtttcatttacaaccggtgaaatgaagaaacgctatggtttaatatatgttgatcgagataatgatggtcatggcacgatggaacgcttgaaaaaagattcgttctattggtatcaacaagtgatagcatcaaatggagataaattataaaggtatattataagtattttagggttagagcccgagacataaattaatatagtaggacctacagtgttataatggcgggcccccaacacaaagaatttcgaaaagaaattctacaggtaatgcaagttggcggggccccaacacagagaaattcgaaaagaaattctacaggcaatgcaagttggcggggccccaacacagagaatttcgaaaagaaattctacaggtaatgcaagttggggaaggacaggaataaattttgcgaaaatatcatttctgttccaatcccgtgatgttaaaatttttaaaaaaataatgccactaactaagtatagtgttaatgtttgagtgtttatgaaagtctttaacccaaattgatgacttactaatcaactataacgatattgttaagtagatgattagtgtcacaaagaaattaaagtagcagtcaaacatagatacaaagtacagttagtggcattatatttagtcctcttttttagcgacaaaagtaatataattcatatctttacgcaatttagtcatcgttttaaacattttacaaaacattggtcgattttctttttttaaagcatttttgataatctttatagttccaacaataccttcgtcataaattaaaccttttggtgtcattaaactcattggaccagtatgataatgcacatgattaaaaccagcttgatgatataaatctaaccagccaagtttcgtctgcggtgagacattgacattaattgctgcagataatgatttaacaacatgtgtggcatgtgattcattaacgatgacaatatcatgtgttaacaagatacccccaggctttaagactcggtagtactcgcgtaatgctttttcctttatggcgatgggtaacattgttaacattgcttcatttaaaacgatatcgaattgattgtcatcaaagggcaatttaacagcattcgcttgttgaacttgaatatatgattcaagacctgctgctgaaatattttcctgtgctttttctaatgctttcttatttatatcaacgccttgaatgtgacagccatatgtatgagctagataaatagatgttgtgcacatattacatgccacttctaacacttgtttatcttgtgaaaatgccccttgttgtattaaccaatctgttgcttctttaccaccggggcgtagacgagtttttcctaatttagctaaaaatgtatgaccagcttctttagacatagcataacctccttttaattgataattattatcattaatatagcatatttatatgcaataatttggaagttaaaaagattacaaaaaattgtcacttcatttataactaaacatgagtcaacaagcataggtttagtggaaaattatttctaatagatgatgttttataaagataaaaaagcacagccatgatatacgaatgttgcatgttatatgctaaaccttcatatcatagctgtgtttgattcatttaaacttgatttacttcttctagtagaggaatagatgcttgcgcgccgtgtttttgtacagtgagtgagctcgctttattaccaaaatcaatagcatctgctaagttatcttgcgacttgtttaagcgactgacaaatgcaccaataaatgtgtcgcctgcagcagttgtatcaatcgcatttactttataagcttcgatgtgttggctttgatttttagtagcaaaatatgtaccttgcttacctagcgtaatcaaaacagtcttaatgcctaaagataaaaagtaattggcattgtctttcatagattgttcattagttactttaatcccagataacaattcggcttctgtttcgtttggcacaataatatcgattaatgataataattcattaggtaatgctttcgctggtgcaggatttaatactgtcgtcacaccatgtgccttggcaatttcaaatgcagatataatagccgggatgggtacttctaattgtgcaacgacaaagtctgcattgattatagcgtcttttgcgttaataacatcttcaggtgtcatcgtcatattcgcaccaccataaacatagatggtgttttgtccttctgcattcacagtgataaaggcttggcccgtttttgcttcagttgttttgataatatatgatgtatcaatatgagccgctttaaaatcttctaagatgaaatcagcaacgccatcagtgccaattttagtaataaatgttgtgtctgcttgcatgcgtgcagtggcaatagcctggttggcacctttacctccgccgaatgctttttgtgcttcttcaacatgtaatgtttcgcctggttgtgcatatctttcaactgttaaaaattgatcgacattcgttgaacctaaaataacaactttgttggtcatgtgtatgctcctttcaagttataatttttaaaaagtaacattcgattctaatgcaatattagagtagggcgttgtttcaccagtacgaatattacctttatttaatgggtgagctaagttacttttcatttcttcgtgaggaatgaaaatgatttcgatttccgatgaaatcaattgtttaatttgttgcaattgtgtagggttatgttcttttatttcttctgctaagtatattttttggatttccatttcttctaacactgtagctaagacatcaataaagcgtggtaagttttttgtgacagctaggtcgatacggcgatgatcatttggaattggcatgccagcgtcattaatcgttaataaatcaaaatgaccaattgtcgcgattgcttttgaaatatgttcatttaaaacagctgattttttcatgacatctacactccttattttataaatactgtaacagaagcggctactaaaatgagtactaagccgataattgtaataaccatttcttttgaagttttatgttgttttaagaaataaataccagttaatgtagcaagcacaacggatgtttgagaaagaataaatccagttgctaaaccattcatattaggttgtgctgaaataagatatgttaaggcaccaaatgcaaagaagaaacctgaaataatttgtaaccacgtaattttattacggaatggattctctgatttcatattcataaagccataaatgactgcaacaattaccatacccattgcttgaggtaaaaaggcagttaggccatcaatagaagttgcttgcggtgcagctgaatataaccagtatccaaattcaccaattaacagaagtaccactgcacgacgtaaatttttggcgttacttgcttctttgcgttcactccaaactgtcatacgtgcaccaattagaataacgactaaagctgtaaatccaatgattttatgaccaatgcctggccaatttcctaatgcaaagacaccccataaagatgcgcctaataattggaatgctgttgtgactggcatggcacgagatgagccgattaattcgaacgctttaaatgtaatgatttgtccgaatccccatcctgcacctgataataaggcgaatagcaaattggttccagtagggaagccacttgatgtgactacggctaatataatagcgaagattaacgtacctacagtagcaccgataatttgatgtacaggtttaccaccaaactttgaagcgactgttgggaagaagccccagccaattaaggggcctaacccgataagtaatgcaacaatgctcatgttatacacctcacgatttgtttttagtaaaacgttttaccaatgccatcgtaccatttttatttgcaaaatgcatgcgttttcataaaaactgaaaacgtttaaatcatatttaaaaattcatacattattattttaatttcttagtgaaataattatgattaaaaaccctcagcattaaagcaacgctaagggcctaacaatgatgagtatatttcggaagatacgtagttagtttgaaagatgatagccagttgttgcacgaatttttaaagtcgttggtaattcaatcatatcaatggatttatctaagtgctgtaatcgttgaagtaataaggttaaagatgttttgccaatatcagttataggttgtgccacagtagttaaaggtggcgagacgtacgctgcataatcaatgtcgtcataacctattaatgagatatctttcgggatactgatgccatgttcaattagtcctcgtaaaatgccaatagcgagttcatcgttaatagcgaagattgcagtggcagattgaaccatgatgtcatcaacaatggttagcccaccgcgcttagataattcagtatggacgatttgtggttctggcaattgattcgcgcgcaaagtatcgacaaatccagcgacacgagtcgacatattcgccatcatgtcatatggtgcaacaattatcatatggttgtgaccgagttctattaaatgttgtgctgcaagttgtccaccttgatattcatttgtccgaacaaaatctgtatagccttgatggtcattttgatccagtacgacataaggtacatgatgtttctttagatagttatttagggcgtccggggatgatatgtattgtgcgataattaatccgtcaatacctcgatcaattaaatgtttaatattgtcatacaaatcagttgctgtagatgttaaaaagcataaatcaacatcagatggtttatggtcatgaatactttgcatcagtgctgagaaaaacggatttgttaagctaggtaaaatgacgccaatagtttgaattttactgccgcgcaattgttttgcatgtttattaggggcatagcctaaacgttctgaaacagcatgtacgttttttatcgttgttgcggaaaaacgactatcattatgatttaaaatatgtgacacagttgtaactgatacaccagcttctctagcaacatctttaattgacacttttttcatattatattccttctctttattgtgtaattaatcatacagttatatacccgattattatattcatcatatcatgataaacatttgatgacatatgaagacgtgaatgacttttattgtctacaaacagacgtctgaagtatacgattaaggttgagacgagagaatatattattaaggttaataccttttaatgattatgataacaagaattttaaaatgtttattgtgatgaaaaatacaaaagtcattattttaaagaataaaatatttgtttttgaacaaagtattaaaaaacataacgaaatgatgtatattgaactatgtgattgaaaaaatttttaattaaggcttgttaaaacttaagagaggatgtttttaaatgcaattcaaattaaaagaagaagagattattagttttttagaattgaaatatccagaaaaagagttcgaatatggtcgtttgttagttggacaacataaacgtgatgatttagatgtttattactttggtgatacgtttttaatgtgcacgattatttcattcaagacatttgaaattaaagaaacagtagaattatcatatgatgctgttaatcgtattgtgttaaaagatggatggttatttagaaaaatgagaatagaaacaatgcaaaaagtgttaaaatacggtacatctaaattaatgttaactgattttcaaaaagagaattataataaatatattcaaggtcagaaacaacgcgtgatatttgaaaatggccattttgtctaattgatagtgaatataattagagtaagcgaagaacagagaaaaacgttcttcgcttatttttcttgaatttcttgtatatcattttaaagtgataaagatatttcgaaacataattcttctattatatttaagatttaactgtttttggaatgatcatgtatgcagacaatgagccaaggatcatcaatacaatgctgacgataaatgttacggttgcagctacacttggtgcatagtttagttgtaacatactgaaaactgtagtacttagtgctataccaaaggcgccacctaatgtaccactcattttatataatcctgtagctaaaccaactttttcatttggcatactgaaaattgcaattgtaaggccgggtgttgcgactaaaccatttccaattgcgcaaatgacgaaaccaatgataactgcaatgacatattgtgatgccgataattgagtcatgctaataatagtgatgccgatgacagggaacaacggaccaatgatgagcatcaatttgccaccgaaacgtaatgttgctttttcacctaaacgaatcatcgcaactgccacaatggcatatggcaatgtaacaagtccagattgcgcagctgataaaccaaggtgtgtttgagcatatatgaaaaagaccactgtaacgcctagaccgctatttaaaacaaagttatttaaaaatgcaccaatgaacggacggttgcgtaatactgagaaatcaataaaaggtacttcatgtcgacgttcgatgatgatgaatatcagcgtagtgatgataaaaatgctcagacaaatgaatgagaatgtactaaaccaaccttgttcgaatccttgtgttaacaataatgtaaagctaccaatcataacagcgaaaatcgacatacctttgtaatcgaacggatgacggtggctatgttgacttactttttcaggtgtgccttttagaagtaatatggcaatgaaagcaatgactatactaatgatgaaattcatttgccatccgaaatttgtagcaattaaaccgccgataacaccagctaggccgatgcccccaacagtactaatcattagataactaatcgctcgtcttaaatgttctcctttaaattgattatttaaaacgccaactgttgaaggtaacaagatagctgctgatagaccttgtaaaattctaccgatgatgagcagtgcagtgatgtccgatataattaatagaagagatgcaaacatactgattatgagacccatgtatgtcattctcagttgtcctattttatcagcaatatcacctgcagccaccatgaagatacctgtggcgaaggaagttaaactaatagataaatttaacacggcaggagaggtttgatacgtttgaccaacgagaggtcctatattaataaatgattgtgcaaacaaccaatatgttaatgcagacaacataatcgcaataataatattactgcgtggtgaagattgtgtgttattcacagatgtcactccttgtaaaaattaaatatagaaagtcatgagatgaagtgaacggatgtatagatgatcgttcactcacacataagtcatgatttccttacatatcataccacagttattgagaatgaatatcaattaattgcttgtatgattgattttttatagtatgtttaagtgaaacagctttatttgaaagtgattaaagtaaatgaaggtacagaggagtgagaacaatgtgcacaggattcacaatacaaactttaaataatcaagtacttcttggacgcacgatggattatgattatccattagatggttcgccagcagtgacgcctagaaattatcgttggacatctcgcactggcacgacaggccaaacgcaatatggctttattggtacaggaacagatatggaaggttttatttatggtgatggtgttaatgaacatggcgttgctatttcgacacaatatttccgaggttatagttcatatggctcaacacacaaagcggacgcgatgaatattacgcaaaatgaaattgtgacatggattttgggatatacaacaagcattgaagatatgaaacaacaagcatcccaaatacatgttgtagcggtatatttaaatgacatcggtgaagttccgccattgcattatcatgtttccgatgcaactggacattcagtcgaagtttcatttaaagagggggaagtggttataaaagataaccctattggtgtcttaacaaatcatccagacttagattggcattatagtaatttaagacaatatatcaatatttctccttatccagcaacagcaaagttattggaaggtgtaacgattgaacctttaggcaatgaagcaggtacatttggattgccaggtggatttacttcaactgagcgctttgtgagaatggcatttatgaaagcaaacattgctcaaaacaatgataaagaaatggatttaatgaatgcattttatttattagatgcggtaaatataccgattggaattgtacgtccgcatgatgctgacaatcactatacgatgtatcagaccgtaataaatttaactacaagaacgttatatattaagtattatggcagcaatgaaatagtagcattaaagctcacagatgatttaattaatagaaaagatatgacgatttttaagcctgagaagcatatcactattagaaagttgaatgacaatcaatagcgattgagaatggaatttggttgatatgatttgatggatgattactatcatacattagcgttgaaccgcgaacatggacgaatgattagttgttaattttgaaaatttataaaagcttaagcgaatgcagtgagagatgtcattttaatatcaatgtatggctattttgtaatgacaatgtaatgagtttagtaaaacatttcgggaatattaaatagttggaaaatgagaattaaatcctttactcagttgtctaattcttttagtatgtgcagtacagtttaattgaaaactaactttaactttaatggaggatgttttatacatgaaaaaattaacagcagcagcgattgcaacgatgggcttcgctacatttacaatggcgcatcaagcagatgcagcagaaacgacaaacacccaacaagcacatacactaatgtcaacacaatcacaagacgtatcttatggtacttattatacaattgattctaatggggattatcatcacacacctgatggtaactggaatcaagcaatgtttgataataaagaatatagctatacattcgtagatgctcaaggacatacgcattatttttataactgttatccaaaaaatgcaaatgccaatggaagcggccaaacatatgtgaatccagcaacagcaggagataacaatgactacacagcgagtcaaagccaacagcatattaatcaatatggttatcaatcaaatgtaggtccagacgcgagctattattcacatagtaacaacaaccaagcgtataacagccatgatggtaatggaaaggtcaattatcctaatggcacatctaatcaaaatggtggatcagcaagtaaagcgacagctagtggtcatgcgaaagacgcaagctggttaacaagtcgtaaacaactacaaccatatggacaatatcacggtggtggtgcgcattacggtgtcgactatgcaatgcctgaaaattcaccagtttactcattaactgatggtacagtagtacaagcaggttggagtaactatggtggcggcaatcaagtaactattaaagaagcgaacagtaataactaccaatggtatatgcataataatcgtttaactgtttcagctggtgataaagtcaaagctggtgaccaaattgcatattcaggtagtacgggtaattcaacagcgcctcacgtacacttccaacgtatgtctggtggcatcggtaatcaatatgcagtagacccaacgtcatacttgcaaagtagataatacagtaaatcccaagttacaatatcatacgcaacttgggattttttcgttttaataataggtataagcccattgcttgtcctctaaaacatgttgataaaaaggatcttggccaattaacttgatatcatctgcaagtgcttccacttcatctaaatgatgggtagttaatataattaaacatttagatttcatgatgttaagtagttggtggatgtcatgtctagattttaaatcaataccaactgtcggttcatctaaaatgagaattcgaggttgacctagtaaacctactaatatattaattttacgtttatttccaccggacaatgtagatactttggcagacgtatcatcaaagtttaattgctgtaaatattcgttgatagttgtatcattaattggatttttacaaagtgatttaaaaaatttaatgttttcagccactgtcatgtgttcaaataacgcaatgtcttgtggcacataaccgatgtgattttgtatttgtctttgattccatttttcgccgaaatagttgatagttccatcattagctttttcaataccagcaatcatacgaagtaatgttgattttccagcaccattatcaccaagtaatacggttaaacgattactatcaaaggacatagttaaatgattgaaaatctgtttgttacggtaacgctttgaaagattattaatttctatcatcagttacgctcctttacatgaaaataatcaagtatacgatacccatagcaagtgcatatataaatgtcatgaataaacgatgacttattgtttgaatatggaataagataaagacgatacctatctcataaatcaatataagtaacaatgattttaagtaaaatattaagctgagtggttgagacaaatatagactaactgccaatagtaccaacaataacaagatcgtatgtgtcattacataagtactatatagtttgaaacggcttaaatgatattgtgataatcgttgcaatgctgcttgttggtttaaacgataatgaagtactacttgaacagcgctaacaaataaaatcaccgcaaagattaagctaattgaaatagagtgttgtgcttgtttagtaagcgacacaaatttgattttagattcaggtgtatgtttatgataggacttgttgatagcatcgatggattgatgctgtttcatatcctcaaggtgttcataaataatgttaggaatttgctgttcatataatgaactactaacaatttctatagcaataccacctataaagtcatctctaccatataactgtatcgtttcttttaaacggttctcttttaatttttgagagaaacctttaggaatttgcatgcttaaaatagcttcctttttagtaacatcatcttcaatatagctttcatcttcatcgacttttttaatagttacatagtcagattgtttaattttattgacgaatgattttgatgcagtggtttggtctaaatcttgaatggtaatcggtattttgaagttgtcatgtgctacacggtaaccgataccaataagtacgagtgcgatgacaatggttgttacgagcaagatgtattgtaaccattgcttgaacaaaacaagttgtatataaggcttcattgacgatacctccaaaccaatacagctaaattaattatcaaaagtgcgatgaagctaagatagaaactagggtgcagttctaaaatgtagttgtttaaaataatttctaacaattgatttgttacaactgcgaacggttgaatattgaaaacgccatttgctatatgttgtaaaaaaatcgtaggtattgttaaaccagataacaccaggatgacaatagctaatatgactttactaatactattcaacaagcctgttgttaaaagttcgatgagtaataaccacagtattaaaaaggtaacataatagcttaaatgaatggctaacgttggccaattatataattcaaaggtattcggaatactgaacacaatccaaactacaccaacgatactccataacatagtataaaaccatgtaatcaacgcacgaatgattaataaacgctctttagaaaaatgaaacattttcaatcgcgctttcaatacagtatcttgattcattttcaaaactgtaaataaagatagtgcaaagatgaataccgttgctaaaaatcctgtaattgcataataactgcccgtatcgtataaatgaatcggttctaagttaaatgcacctgaacggtttaatcctgtaatcagcaaatcagtcataacattgatactgtcagaatgtgatgctttcggtgctaagtcttgaaaagctaagatgccacccattgatcgcataagacgttggtaaacagaatctgttagctgagatagcacgacacttttcatggattgttgatcatatgtatatactgaaattggtagttcgccttgtttataaaatgccttggtcatacctttatcaaaaacaaaatagccttgaagtttatgtttttttaacaaagtatgtgcttgcttatcatcatatgctttaatgcttacattttttcctaggttactccctttaccaatagagtttaagattaatttcgtttcacttgattgatctttatctacgacacctatattaaaatgattgtcatcttctgttacatgttggatcgtcgttaatgtaataaggagtgccgctaagataaatagtaaatagataatcaaataccactttttcaataaaaaagagtggtagatgcgaaacaaatgtattgttttcatttaaccactcctccaatgataagattgaaaggcaagatgacctttcaatcttatttttatattttagttatttagatgccttttttaaaattgattcaaacattttgccgccatttttttcgatttctttttcaagtttttcacggtcttttgaagatagactattgaaatctttcgcaccactatcatcaaaatcaatatctgctttcaattttgtgctagattttaaaatgaaattaattggttcttcagcatatttgatgccgatatttaacgtagatttctgagtgttattttttacgtcagaatctatattattttcaaaagtgaattcattttcgtcgctatatttatctaatgcgacagtgattttacctttatcttgacgttttgtgccatctactttttcttggttatctaatttgatttttgattcatcatattctgtctttttaccaaattcgtatttatcgctgtatttattgtctttttccttagaagatacgcctttaattgtatatttcgcttcagcatacgtgtatttatcttgatcgaaatcaagtgcgtaatctagttttaacttatcgtcttctaaagtattagtacctttgattttagttttattattttctttgtctgtaatagtaatttctcgttttacaatcgtatgtttttcggtataaattttagattgaattttagcaaattcatcctttttagtttctttgacatcgtcaattgcttttttgatgtccttatcatagtcttttgtagcaccttgttcttccattaattttttaaggtctttatcctttttagcttcttctaatacagctaatgtaatttttttagtgtcagctctgctaagtgttaacgtgacaggtctaactttgtacttttcaccattaaccttaatttcttcttttttacctttatcaaaattatcgtcatctaatttgtcgacaataagttcggaatatttttcggcaattttgctgtagtcactttgttgtgcttgagcattactaaaaagagtatttaaatttagttgttggtttgtaataccattttcttttgctgtttcttcatcttcacctgtaagttttgaatacgttgataataaatcagaattattaacactatatttccctttaaataatggtgattcgaaataatgcttatctttatctgcagctaactggaatttccctaatgcagagtctgcgattgttggttcaagattaatcattgatttctcttttttaggatcatgtccatatgacattttaattttcgaagcattaacaacagatttaggaataccaagccccttaacaatttcatctgatgcatctgcgcttaattctaatgaagataaaaacgaattatctttcatcttttcttggaacttcacttcattttcaaaacggtcattaaaataatctttatacatttttgcagtttgttgttcgctttttaagtatgtatttttcggtgtgtttgcaaaaaatgcataaactccccatgcgattccacctattaataataagacaataataataggaattataatttttaactttttagacattttgcttcctcccaattatttatgagttaatcatataagaacaatacattttattaaatggtttattttaaattttgtttaaattaatagaattttagttataataatgtttaataagttattgaaaatctaataaactacaaaaaatagtttgattacataatgattcttgaaaaatgtcggttaactttaaggtgacaagttattgcaattttgaaggtaaacatcatatttaataatcgaataacatacaaaataaagcgaccaattttgcagtgttacgaattgtaaactgcgaactggtcgctttttattgatgtcatgattaatttaatggatgtaattatatgatgaaacttctgaagcagagatggttcttgatgaaacgatatattcaccaatccagttcatttctgaaattagaatacttccatcaatattaactttttcaacgtaggctacatgaccaaatggaccatttactgtttgtaaaattgatcctcgtgttgggtgtctatctactttgaagccattgcttgaagcttggcctgcccagtttttagcatctccccaaaatgtactaatcgtgtgtccatctttggcacgtttatcaaagacataccatgtacattgtccagcagtatataagttgttcttacttgtgataagaggctgatcaatgattttaccgttacctaatgctaaaggtttaccgtcagcagtctttgctttgtcattaaattcggcgatttgtaattcgtcatacaattcgtctaaatcgatgcctgtaataagccctttgttatcttttgaaaaagcgttatttaattcatcgtcattgtcttcgacattcggtattgctggtgtcaaaggattgcttggtgacgtttgaggcggtgtgtgtgaatcaattgcgtcattaatgtgcgtatactgaccacttaatgaagaatggtactgattgttgttaaaatcacgttgatttgcgtgttgatgattgtcgtttgtacgtgactggttttgatgattgttgtttggcgtgttgtttttgtcatatgtataagtatacgcgccggtgtctttattcactttgaactgtgcgtttgggtgtgctctctttgcttcttctaatgttttgctatcattcgtatatgcttgagccgagttaggcgacatactaaataaagtaagagttgtcatcgtcagtaaaattgttttcttcataataaccatttaatcctttatgtatttaatttaattttagtatacacatttatattacaaaaatgaatggttaattaaaaatatatgggtatattcaatatatttatttaaaaaaagctaaaaatacttaaaaaactatatacatatactaataatttatatattatttgagtaaggagcactttttcaaaaaatagtgtccctaaaaagttttgataaacttaaaatattcaggaggtttctagttatggcaatgattaagatgagtccagaggaaatcagagcaaaatcgcaatcttacgggcaaggttcagaccaaatccgtcaaattttatctgatttaacacgtgcacaaggtgaaattgcagcgaactgggaaggtcaagctttcagccgtttcgaagagcaattccaacaacttagtcctaaagtagaaaaatttgcacaattattagaagaaattaaacaacaattgaatagcactgctgatgccgttcaagaacaagaccaacaactttctaataatttcggtttgcaataagcattctgaaattggcaaagtcacattttctaatgtggctttgcttatcattttttaagaaaacaactgaaaggaaataagcatgaaaaagaaaaattggatttatgcattaattgtcactttaattattataattgccatagttagtatgatattttttgttcaaacaaaatatggagatcaatcagaaaaaggatcccaaagtgtaagtaataaaaataataaaatacatatcgcaattgttaacgaggatcaaccaacgacatataatggtaaaaaagttgagctgggtcaagcatttattaaaaggttagcaaatgagaaaaactataaatttgaaacagtaacaagaaacgttgctgagtctggtttgaaaaatggtggataccaagtcatgattgttatcccagaaaacttttcaaaattggcaatgcaattagacgctaaaacaccatcgaaaatatcgctacagtataaaacagctgtaggacaaaaagaagaagtagctaaaaacacagaaaaagttgtaagtaatgtacttaacgactttaacaaaaacttagtcgaaatttatttaacaagcatcattgataatttacataatgcacaaaaaaatgttggcgctattatgacgcgtgaacatggtgtgaatagtaaattctcgaattacttattaaatccaattaacgacttcccggaattatttacagatacgcttgtaaattcaatttctgcaaacaaagacattacaaaatggttccaaacatacaataaatcattattgagtgcgaattcagatacgttcagggtgaacacagattataatgtttcgactttaattgaaaaacaaaattcattatttgacgagcacaatacagcgatggataaaatgttacaagattataaatcgcaaaaagatagtgtggaacttgataactatatcaatgcattaaaacagatggacagccaaattgatcaacaatcaagtatgcaagatacaggtaaagaagaatataaacaaactgttaaagaaaacttagataaattaagagaaatcattcaatcacaagagtcaccattttcaaaaggtatgattgaagactaccgtaagcaattaacagaatcactgcaagatgagcttgcaaataacaaagacttacaagatgcgctaaatagcattaaaatgaacaatgctcaattcgctgaaaacttagaaaaacaacttcatgatgatattgtcaaagaacctgatacagatacaacatttatctataacatgtctaaacaagactttatagctgcaggtttaaatgagggtgaagctaataaatacgaagcaattgtcaaagaagcaaaacgttataaaaacgaatataatttgaaaaaaccgttagcagaacacattaatttaacagattacgataaccaagttgcgcaagacacaagtagtttgattaatgatggtgtcaaagtgcaacgtactgaaacgattaaaagtaatgatattaatcaattaactgttgcaacagatcctcattttaactttgaaggcgacattaaaattaatggtaaaaaatatgacattaaggatcaaagtgttcaactcgatacatctaacaaggaatataaagttgaagtcaatggcgttgctaaattgaaaaaggatgctgagaaagatttcttaaaagataaaacaatgcatttacaattgttatttggacaagcaaatcgtcaagatgaaccaaatgataagaaagcaacgagtgttgtggatgtaacattgaatcataaccttgatggtcgcttatcgaaagatgcattaagccagcaattgagtgcattatctaggtttgatgcacattataaaatgtacacagatacaaaaggcagagaagataaaccattcgataacaaacgtttaattgatatgatggttgaccaagttatcaatgacatggaaagtttcaaagacgataaagtagctgtgttacatcaaattgattcaatggaagaaaactcagacaaactgattgatgacattttaaataacaaaaagaatacaacaaaaaataaagaagatatttctaagctgattgatcagttagaaaacgttaaaaagacttttgctgaagaaccacaagaaccaaaaattgacaaaggcaaaaatgatgaattcaacacaatgtcttctaacttagataaagaaattagcagaatttctgaaaagagcacgcaattgctatctgatacacaagaatcaaaaacaattgcagattcagttagtggacaattaaatcaattagataataatgtgaataaactacatgcgacaggtcgagcattaggcgtaagagcgaatgatttgaaccgtcaaatggctaaaaacgataaagataatgagttattcgctaaagagtttaaaaaagtattacaaaattctaaagatggcgacagacaaaaccaagcattaaaagcatttatgagtaatccggttcaaaagaaaaacttagaaaatgttttagctaataatggtaatacagaggtgatttcaccgacattattcgtattattgatgtatttactatcaatgattacagcatatattttctatagttatgaacgtgccaaaggtcaaatgaatttcattaaagatgattatagtagtaaaaaccatctttggaataatgtcattacgtcaggtgttattggtacaactggtttggtagaaggattaattgtcggtttaattgcaatgaataagttccatgtattagctggctatagagcgaaattcatcttaatggtgattttaactatgatggtctttgtacttattaatacgtatttactaagacaggtaaaatctatcggtatgttcttaatgattgctgcattgggtctatactttgtagctatgaataatttgaaagcggctggacaaggtgtgactaataaaatttcaccattgtcttatatcgataacatgttcttcaattatttaaatgcagagcatcctataggcttggcactagtaatattaacagtacttgtgattattggttttgtactgaacatgtttataaaacactttaagaaagagagattaatctaatgttgatgaatagcgtgattgctttaacttttttaacagcatctagcaataatggcggacttaatattgatgtgcaacaagaagaggaaaagcgaatcaataatgatttaaatcaatatgatacaacgctatttaataaagatagtaaagaagtcaacgacgcgattgctaagcagaaaaaagaacgacaacaacaaataaaaaatgatatgtttcaaaatcaagcgagtcactcgactcgcttgaatgaaactaaaaaagtgttattttccaaatctaacttagaaaagacttcggagagtgataaaagcccctatattcaaaacaagcaggagaaaaaaatattcccgtacattttgatgtctgtaggggcttttttgactttaggatttgtcattttttcaattcataaagggagacgaacgaaaaatgaatcagcacgtaaaagtaacatttgattttactaattataattacggcacatatgacttagcagtaccagcatatttaccgataaaaaatttaatagctttagtattggatagtttggacatttcaatatttgatgtcaatacacaaattaaagtgatgacgaaaggtcaattacttgttgaaaatgatcgactcattgattatcaaatcgctgatggagatattttgaagttactataggaggaaaaatagatggttaaaaatcataaccctaaaaatgaaatgcaagatatgttaacgcctttagatgctgaagaagcagctaaaacaaaattacgcttagatatgagagagattcctaagtcttcaattaaaccagaacattttcatttaatgtacttattagaacaacattctccatattttatagatgctgaattaactgaactacgtgacagtttccaaatacattatgacattaatgacaatcatacaccttttgataatattaaatcatttactaaaaatgaaaaattacgatacttactcaatatcaaaaatttagaagaagtaaatcgtacacgttacacatttgttttggcaccagatgagttatttttcacaagagatggattaccaattgctaaaacaagaggtttacaaaatgttgttgatccattaccggtgtcagaagctgaatttttaacaagatataaagcactggttatctgtgcattcaatgagaaacaatcatttgatgctttagttgaaggaaacttagaactacataaaggaacgccatttgaaactaaagttattgaagcggcaacgttagatttactaacggcatttttagatgaacagtatcagaaacaagaacaagattatagtcaaaattatgcatatgtacgcaaagtagggcataccgttttcaaatgggttgctatcggcatgacaacgttaagtgtgttattaattgcatttttagcctttttatatttttcagtaatgaagcataatgagcgcattgaaaaaggataccaagcatttgtaaaggatgattatacgcaagtactaaatacgtatgatgatttagatggaaaaaaattagataaagaggcactttacatttatgccaaaagttatatccaaacaaataaacaaggtttagaaaaagataagaaagaaaatttacttaataacgtgacaccaaattcaaacaaagactacttattatattggatggaattaggacaaggacatcttgatgaagcgattaatattgccacttatttagatgataacgatattacaaagttagcgttgattaataaattaaatgagattaaaaataacggagatttatcgaatgataaacgttctgaagaaacgaaaaagtataacgataaattgcaagatattttagacaaagaaaaacaagttaaagatgaaaaagcgaaatctgaagaagagaaagcaaaagcgaaagatgagaaattaaagcaacaagaagagaacgaaaagaaacaaaaagaacaagcacaaaaagataaagaaaaacgccaagaagctgaaagaaaaaaatagtataggactgaggcaaagacaatgcataaattgattataaaatataacaaacaattgaagatgctcaatttgcgagatggtaagacatatactattagcgaagacgagcgtgcagatattacgttgaaatcgttaggcgaagtcattcatttagaacaaaataatcaaggtacttggcaagcgaatcatacttctattaataaggtgcttgttagaaaaggtgaccttgatgacattacattacagctttatacagaagctgattatgcatcatttgcgtatccttcaattcaagatacgatgacaattgggccaaatgcgtatgatgatatggttattcaaagcttgatgaatgccatcattattaaagattttcaatcaatacaagaatcacaatacgtacgcattgtgcacgataaaaatacagatgtgtatattaactatgaactacaagagcaattaacaaacaaagcttacattggtgatcatatttatgttgaagggatatggctcgaagtacaagctgatggtttaaatgtattgagtcagaatacagtggcatcgtcattaattcgcttaacacaagagatgccacatgcacaggcagatgattacaatacgtaccatcgttcgccaaggattattcaccgtgaaccgaccgatgatattaagattgaaagaccgccacagccaatacagaagaacaatacagtgatatggcgttccattataccgccattagtaatgattgctttaactgttgtcatctttttagtgagaccaattggtatttatattttaatgatgattggtatgagtacagtaacgatagtatttggtattacaacgtatttctctgaaaagaaaaagtataacaaagatgttgaaaaacgagagaaagattacaaagcttatttggataataaatctaaagaaattaataaagcgattaaagcacaacgttttagtttgaattaccattatccaacggttgctgaaattaaagatatcgttgaaacgaaagcaccaagaatatatgaaaaaacatcgcatcatcacgatttcttacattataagttaggtattgcgaatgtagaaaagtcattcaaattagattaccaagaagaagaatttaaccaacgtcgtgatgaactattcgacgatgctaaagaattgtatgaattttacacagatgtagaacaagcaccattaatcaatgatttaaatcatggaccaattgcatatattggtgcacgacatctcattttagaagaattggagaaaatgctaatccaattgtcaacgttccatagttatcatgatttagagtttctatttgtgacacgtgaagatgaagttgaaacattgaaatgggcacgttggttgccacatatgacattgagaggtcaaaacattagagggtttgtttacaatcaacgaacacgtgaccaaattttaacgtcaatttatagcatgattaaagaacgtatccaagctgtgcgtgaacgcagcagaagtaatgagcaaattattttcacaccgcaattagtgtttgtcattacagatatgtcattaattattgatcatgtcattttagaatatgtaaaccaagatttatcagaatatggtatttcattaatctttgttgaagatgtgattgaaagtttgccagagcatgtagataccattattgatatcaagtctcgtactgaaggcgaactgattacgaaagaaaaagaattagttcaattgaaatttacacctgaaaatattgataacgttgataaagaatatatcgcgagacgtttggcgaatttgatacacgtcgaacatttgaaaaatgcaattcctgatagtattacatttttagagatgtataacgtgaaagaagtagatcagcttgatgtggttaatcgatggagacaaaacgaaacatacaaaacgatggcagtacctttaggtgtaagaggtaaagatgatattttatcattgaacttacatgaaaaagcacacgggccacatggtttagttgctggtaccactggttcagggaaatctgagattatccaatcatacattttatctttagctattaattttcatccacatgaagttgcgttcctattgattgactataaaggtgggggtatggcgaacttatttaaagatttagtccatttagttggtacgattacaaacttagatggcgatgaagcgatgcgtgccttaacatcaatcaaagccgaattgagaaaacgtcaacgtttattcggagagcatgatgttaaccatattaatcaataccataagttatttaaagaaggtgttgcaacagaaccaatgccacatttattcattatttccgatgagtttgccgaattaaaatcagaacaacctgattttatgaaagaacttgtatcaacggcacgtattggacgttcgttaggtattcatttaatacttgcgacacaaaaaccatcgggtgttgttgatgaccaaatttggtctaactctaaatttaaattggcattaaaagtacaagatagacaagacagtaatgaaattttaaaaacaccagatgcagcagacattacattaccaggtcgtgcgtatttacaagttggtaataatgaaatttatgaattattccaatctgcatggagtggtgcaacatatgacatcgaaggcgataaattagaagttgaagataagacgatttacatgattaatgactatggtcaacttcaagcaatcaacaaagacttgagtggacttgaagatgaagaaacgaaagaaaaccaaaccgagttagaagcggttatcgatcatatcgaatctattacaacacgattagaaattgaagaagttaagcgtccatggttaccaccattaccagaaaatgtatatcaagaagatttagtagaaacagatttcagaaaattatggtcagatgatgcaaaagaagtggaattaacattaggacttaaagacgtaccagaagaacaatatcaaggaccgatggtattgcaattgaaaaaagctgggcacatcgcgttaatcggaagtccaggatatggtagaacaacgttcttacacaacattattttcgatgttgcaagacaccatcgtcctgatcaagcacacatgtacttgttcgatttcggtaccaatggtttgatgccagtcacagatataccacatgttgctgattattttacagtagatcaagaagacaagattgctaaggcgatacgtatatttaatgatgaaatcgatcgtcgtaagaagattttaagtcagtatcgtgttactagtatttctgaatatcgaaaattaactggtgaaacaattccgtatgtctttattcttattgataactttgacgcagtaaaagattcacctttccaagaagtttttgaaaatatgatgattaaaatgacacgtgaagggctagcattagacatgcaagtaaccttaactgcttcaagagctaacgcaatgaaaacgccaatgtacattaatatgaaaacgcgtatcgccatgtttttatatgataaatcagaggtgtcgaacgtagtagggcaacaaaaatttgcggttaaagatgtagtgggtcgagcattgttaagtagtgatgacaatgtatcattccatattggccaaccatttaaacatgatgagactaaatcatataatgatcaaattaatgatgaagtatcggcgatgacagaattttataaaggtgaaacaccaaatgatattcctatgatgccagatgaaattaaatatgaagattacagagaatcattaagcttaccagatatagttgccaatggtgctttaccaattggattagattatgaaggtgttacactacaaaaaattaaattaactgaaccagcaatgatttcatcagaaaatccgagagaaattgcgcatattgccgaaattatgatgaaagaaattgacatattaaatgaaaaatatgcgatttgtatcgcagactcaagtggagagtttaaagcttataggcatcaagtggctaactttgccgaagaaagagaagacattaaagcgattcatcaactaatgattgaagacttaaaacaaagagaaatggacggtccatttgaaaaagattcactttacattatcaatgattttaaaacatatattgattgcacgtatatcccggaagatgatgttaaaaagcttattacaaaaggaccagaacttggcttgaacattttatttgtcggcattcataaagaattaatagatgcttatgataaacagattgatgttgcacgtaaaatgattaaccaatttagtataggtattcgtatttcagaccaacaattctttaaatttagatttattcaacgagaacctgttattaaagaaaacgaagcgtatatggtcgcgaatcaagcttatcaaaagattagatggtttaaatagtaatgaattaaataggagggaggtatgttatgaattttaatgatattgaaacaatggtcaagtcgaaatttaaagatattaaaaagcatgctgaagagattgcgcatgaaattgaagttcgttctggatatttaagaaaagctgaacaatataagcgattagaatttaatttaagtattgcactagatgatgttgaaagcacagcaaaggacgtacaaactgcaaaatctagtgctaataaagacagtgtatctgttaaaggaaaagcgcccaatacgttatatatcgaaaaaagaaatttgatgaaacaaaagcttgaaatgttgggtgaagatatcgataaaaataaagaatccctccaaaaagctaagggaattgctggcgaaaaggcaagtgaatattttaataaagcaatgaattaatattgaggtgaagatatgggtggatataaagggattaaagcagatggtggcaaggtgaatcaagcgaaacaattagcggcaaaaatagctaaagatattgaagcatgtcaaaagcaaacgcaacagctcgctgagtatatcgaaggtagtgattgggaaggacagttcgccaataaggtgaaagatgtgttacttattatggcaaagtttcaagaagaattagtacaaccgatggctgaccatcaaaaagcaattgataacttaagtcaaaatctagcgaaatacgatacattatcaattaagcaaggacttgatagggtgaacccatgatgaaagatgttaagcgaatagattatttttcttacgaagaattaacaattttaggtggtagtaaattgcctctcgtaaattttgaattgtttgatccatcaaattttgaagaagctaaagtggctttaattgaaaaagaattagtaacagagaatgacaagttaactgatgcaggttttaaagtggctacattagtaagagagtatattagcgcaattgtaaatattcgaattaatgatatgtattttgcaccatttagctatgaaaaagatgaatatattttgttaagccggtttaaaaataatgggtttcaaatacgaattatcaataaagacattgcatggtggtcgattgtacaatcatatcctttattgatgagacaagaaaaatccaatgattgggactttaaacaaattgacgatgaaatattggagaacttaaataatgaaagtatcgatacgattgggcgtgttttagaaattgaaatctacaatcatcaaggtgaccctcaacaaagtttatataacatttatgaacaaaatgatttgttactcattcgatacccattaaaagataaagtgctgaatgttcatattggtgtcattaatacatttatacgagaattatttggattcgatactgatgaaaatcatattaataaagcagaggagtaatgacgttgagtggaaaaattagtgttaaagctgaaacgattgcacatgttgtaaaagaattggaaagcattagtcaaaagtatgatgaaatagctcaaaactttggaaaaatagcgcaattaaattactacagtagtgaaaaagctgcacattctatggaaaatggctatagtagtgctgcaacagtcattagtggtctcaaaggtccattgagtacactcggtggtggcgtcatgaattcagcacaaaagttctttgaagcagatgaacattggggtacggaatttgccaagctttactataatattgagggataggtgcatgacatgacaaaagatattgaatatctaacagctgattatgacaatgaaaagtcatctatccaaagtgtaatagatgcaatagagggtcaagacttcttagatgtagatacaacaatggatgatgcggtaagcgatgtcagttctttagacgaagatggcgcaatatcattaacaagtagtgtagtaggtccacaaggatctaaattaatggggtattatcaaaatgagctatatgattatgcatctcaattagattcgaaaatgaaagaaattattgacacgccatttatagaagatatagataaagcattcaaaggtataacgaatgttaaattggaaaatatattaataaaaaatggcggtggtcatggtagagatacctatggggcttctgggaaaattgcaaagggagatgccaagaaaagtgacagcgatgtttatagcatcgatgaaatattaaaatcggatcaagaatttgtaaaagtaattgatcagcattacaaagaaatgaaaaaagaagataagaaactatctaagagtgattttgaaaaaatgatgactcaaggtgcttcttgtgattacatgacagtagctgaagcggaagagatagaagagcaaaagaaaaaagaagaagctatagagattgcagcactagctggtatggtagttttatcttgtattaatcctgttgctggagcagtagctattggtgcttattccgcttattcagcagcaaatgcagccacaggaaaaaatattgtaactggaagaaagctatctaaagaagaacgaatcatggaaggactttcgcttattccattgccaggtatgggcttcctcaaaggtgctgggaaaagtttaatgaaattaggcttcaaaggcggagaaaaatttgcagttaaaacaggattgcaaaagacaatgcaacaagcagttagtcgtatttcacctaaaatgggaatgatgaaaaacagtgtgttgaatcaatctcgtaactttgctcaaaatactcatgttggacaaatgctgagtaacatgcgtggtcaagcaactcatactgttcaacaaagtagaaattggattggacaacaagcacaaaatgtcaaacgaatagtgaataatggacttgataaagaaatagcacatccatttaaacaacaacttgcaccagcgggaatgggtggtataaaatttgctgaaacaactactttgagaaacatgggtcaaaacatgaaacgtgctgttacaccacaaaatcacgtgacacatggtccgaaagatagtatggtgagaagtgaaggtaaacatagtgtaagtagccatgaaataaatttatcaaaatatgttgaatcaccaaactacaccaaggtcaaatatggagagcaatatgcaagacttagacctaagaaactaaaagcaaatatagaatatacaacaccaactggtcacatatatcggactgatcataaagggcgcataaaagaagtttatgtagacaatctttctctaaaagatggcggtcgtaataaccatgcacaaagaactgtgggaggagaggatagattaccagacgatgatggaggtcacttaatcgccagaatgtttggtgggtcaaaagacatagataaccttgtagcacaaagtaaatatatcaaccgttcatttaaggaaaatggtgattggtacaagttggaaaaactatgggaaaaggcaatcaagtctggaaaatcaatagaaaatattaaaatagaagttaaatataaaggtaatagtcaaaggccgactatatttaaagttgaatatgaaattaatggtaaaagaaatattagaagaatattaaataagtagaggtgccaacatgacatttgaagagaagcttagcaaaatatacaatgaaattgcgaatgagattagcaatatgataccggtagagtgggaaaaagtatatacaatggcttatatagatgatggaggaggggaggtattctttaattatactaagccaggtagtgatgacttgaattattacaccgatatacctaaggagtataacatttctgtgcaagtatttgatgatttatggatggatttatatgatttgtttgaggagttaagagatttatttaaagaagaagatttagaaccatggacatcatgtgaatttgactttacaagagagggtaaattgaaagtatcatttgattatatagattggataaatacagagtttgatcaattgggccgtgaaaattattatatgtacaaaaaatttggggttataccagaaatggaatatgaaatggaggaggttaaacaaatcgagcaatatattaaagagcaagaagaatagacaatcttaatgtgagactaaacaataaagctttgtttagtcttttttggcggttaagtaaaaagcaatagataccgtaaagttgatgctcgtcaaataataatataaagatagttttatgctttgtatagataaaaacctaagtacttataactttaaatacgtaatatgctatttaaaagataatgtataggagacagatatgactactaaagaaaatattgatactcttcgaaagccaggtgcacaagccttaagtttaatatcattgtttttgatacttttttcatgtctaactttcttttttggtttagattatgaaaggtttccaaactatttaaagataacgacaattatagaattaataattattgtaattagtttacttcaatggattaggtttatagatttcgaaaaagaaagtgcacggaaatataaaaaaatatatgctcgatttttagttattataaatgtgttaactactatcactgtagtatttgcactgtgtaacctttattattttgcagctgtacaaaaccattatgatttattcaattattggttaatgggtacgatttcaatcataattagctatttattattagtaattggcggaatgtttacgttgttaaaattacctaaagtaacaaaacgctggggtggtaaaactaaaacacatttcggtttattattaactgcgttgagctcatttatatatattgaaaaaattatcgaatatatattgattcctaatgtcgtagaatccaagtttataattattgtgagcatgttggttatcgctggagcacaatttgtggcatttcaatttattatgcaatacagtagattctatatttttgaattaaacacagaagatgatgactaaatgattttgtaaatactgtgaagtatacttaaattaagaaaatcaacttcaacgtatatcaccatattattttatactcaatgatgtgaatggatttaagtggattgatattaaagtaaaagttatggaatattgaggtgcgaatatggagttcttattattaattgtcgtagccggactgtattatattatatatttaactgctgtgatgtattctgaaaaaatagtagtattgcctataatcatctatgccattttgtttgtaataattggtatcacttatatctttataggcgacagctatgatcaattaacaaatttcaatgtgattttgtatatggggagtttgttttatgcatggatggctattagaaatctttggaacagaccactattactaaaatataagaacattacagatagttcaagtggaatagttaataaatctgaatacaattcagttgaaagcttacgtataaatattgaaatagctaagtataaagggattatttctttgatagtagctatagtactaacggtattaatgacattaaagtcaacacctcaaatcactgcagaaacacgtgacttaagtatctcatttttcatactcagcttatttatcattattatatttgcagtttgggatttgtttattagagttagaaaaggagcgtttgcttttgttgtaataaggccaatattattcagttgttggatatttattttgaatatgattttatcaagattattataattgtattacatataggtgtgggtaaattttatttatgaaatgatgaaaaagtatatactattaatatcttttttactataattataaatagttaaataaattgaaagacaaaataatgagtaggagttaatgagatggaaaaccaaaaacaaggcaatggcttaaaaattgcaacatgggtatttattgtattaacagtagttacaccgctatttggtattggaagtattgtttgtagtattaattataaaaaatacgatgctgaaaaaggttcgaagttattgcaaattgcaattatcgtaacaataattgcttttgttttaaatttattagcatatttaggtttaagataagtaaaacgaatttgaagaagcattaagcgacatttgggtgttgtttaatgctttttatttaacggaaataagtgtagagaataaattaatagtttaatcaagagatatttcgaacacataggggcgataacatgactttcgaagaaaaattaagtcaaatgtacaacgagattgcgaataagattagtagcatgataccagtagagtgggaaaaagtatatacaatggcttatatagatgatgaaggtggagaagtgttctactattacacagaacctggaagcaatgaattatactactatactagtgtattaaataaatatgatatatcggaatcagaatttatggactcagcgtatgagttgtataaacaatttcaaaatttaagaaatatatttaaagaagaaggatatgaaccatggacatcatgcgaatttgattttacaaaagaaggtgaattaaaagtttcatttgattatatagattggatcaatacagagtttgatcaattgggccgtcaaaattattatatgtacaaaaaatttggggttataccagaaatggaatatgaaatggaagaagttaaagaaatcgaacaatatattaaagagcaagaagaagctgaacaatagaggtgataacatgactttcgaagagaaaataagcaaattatataatgagattgcgaatgagattagcagtatgataccggtagagtgggaaaaagtatatacaatggcttatatagatgatggaggaggtgaagtattctttaattatactaaaccaggtagtgatgacttgaattattacaccgatatacctaaggagtataacatttctgtgcaagtatttgatgatttatggatggatttatatgatttgtttgaggagttaagagatttatttaaagaagaagatttagaaccatggacatcatgtgaatttgattttacaagtgaaggtaaattaaaagtttcacttgattatattgattggataaatacagagtttgatcaattaggccgtgaaaattattatatgtacaaaaaatttggggttataccagaaatggaatatgaaatggaagaaattaaagaaatcgagcaatatattaaagagcaagatgaagctgaactataggggcgataatatgactttcgaagaaaaactaagtcaaatgtacaatgaaattgcaaataaaattagcagtatgataccggtagaatgggaaaaggtatatgcaatggcttatgtaaatgaaagaagtggagaagtgttctacaattatactgaaccaagaagtgatgaattattttactatacgagcgtgttaaataaatataatatatcaagatcagaatttatggactcagtatatgaattatataagcaatttgataaactaagagatttatttaaagaagaaggactcgaaccatggacatcatgtgaatttgactttacaagagacggcaaattgaatgtttcatttgattatattgattgggcgaattcagagtttggacaaatgggaagagaacattattacatgtataaaaaatttggaatttggcctgaaaaagaatatgccataaattgggtaaaaaaataaaagattatgttaaagagcaagatgaagctgaactataggggcgataacatgaattttgaagaaaaattaagtcaaatgtacaacgagattgcgaatgagattagtgggatgataccagtagaatgggagcaagtatttacaatagcttatgtaactgatcaagctggggaagtcatttttaattatactaaaccaggtagtgatgaattgaattattacacatatatccctagagagtataatgtctctgaaaaagtattttatgatttgtggacggatttatatagattgtttaagaagttaagaaacgcatttaaagaagaagatttagaaccatggacatcatgtgaatttgactttacaagcgaaggtaaattaaaagtttcatttgattatattgattggataaatacagagtttgatcaattaggccgtgaaaattattatatgtataaaaaatttggggttataccagaaatggaatacgaaatggaagaagttaaagaaatcgagcaatatattaaagagcaagatgaagctgaactataggggcgataatatgattttcgaagaaaaactaagtcaaatgtacaatgaaattgcaaatgaaatcagtgggatgataccagtagagtgggaaaaagtatatacaattgcttatgtagatgatgaaggtggagaagtcgtttttaattatactaaaccaggtagtgatgaattgaattattacacatatatccctagagagtataatgtctctgaaaaagtattttatgatttgtggacggatttatatagattgtttaagaagttaagaaacgcatttaaagaagatttagaaccatggacatcatgtgaatttgattttacaagagagggtaatttgaaagtatcgtttgattatatagattggattaaattaggttttggtccatcaggaaaggaaaactactatatgtataaaaagtttggtgttttaccagaaacggaatatgaaatggaagaaattcgagaagtagagaagtatgttaaagaccaagagtagcatatatgttatagaaggctgtgcaaaatcaccctcgttttacatttgactcaaagaagaaggtaaacgataagattatttgcaacttaaaaagtttattagcttctcggtatccatacatcatatgtataaatgagtttaactaattaataaatcacgatataaatttaaaattgccattaattgaaaaggttattgtagtgtattttataaagttgatgcacatcgacttattttttaaaacttatatcaaaaaaatatgagaaaagtatatactattaaaatgttttttactataattataaatagttaaatatttggttatgaaataaatgtgtgggaggcaatttttagagatacatagcaatgtaaagatatcaaatagttattgcataatttattatgatgacataattttcagtagatagttgtaaattaacactgaaatagatgtttatattaagaagactttaatatcataattaatcaaaatcttgcgtcaaacatttaaacgaattttaagttgataacaattggttaaacattgttcaaacatcacaatgataaagcatattatcagtattgtagtgtgtggaaaatgacagccatctaaggagaaaaatgatgaaaagaatattggtagtatttttaatgttagcaattatattggcaggttgttctaataaaggtgaaaagtatcaaaaagatattgataaagtgtacaaagaacagaatcaaatgaataaaattgcctcgaaagtacaaaacactattaaaacagacattaaacaagaagacagtaatacacatgtctataaagatggtaaagtcattgttattggtattcaattatataaagatcgtgaaaaaatgtattatttcgcatatgaaataaaagatggtaaggcagagattaatagagaaatagacccaattaagtatatgaaagaccataaagcagattatgaagatgaaaatgtagaagtggaaaaagattaacgtaggctttctttaaaacttttaaccagtttcaaaaagtaaatgagctttagcgacaataatttttaaaataaacacgatataaatttaaacatttatatataagaacacaaacgtaagtttgtaaataataataaaggagtaagtcaatggaaaaatcgatcaaaataatgacaataataggaattgttattcagggtttagcaacggtatttagtttactattgatggttttagcagcatcaggtgtaatgactacagatgtgtcaacaacagttaatggtgaggttgacccagttgatgcagaaacagcagcagcaattttcactgtattattcttatccctattcatatttggaatcatttcaattattttaggtgcaatcggtatgtttaaagcatctaaaaacaaaaaaatgagtggtatattgttgattattggagctgtaataagtggtaacataattacatttgctttatggttagtcagtggtattaaactacttactaataacaagcctaaagatgaaataagcgacttatcataaacatcgtatattgaaatttcaagatttcttaagtaattaaataaagtgctctcttagaagtagattttcagtcaataactgcttttaagagagcattttgtatttgataatgctcatagcatcggacaaaaaccattgacgaacttaaaaaaaatacgttagacaatgcacttctaaatatttaaggcatcgactaacgcattgttcaaatatagttaattatttttataaaattgatgatgatcattcaagtaagcatagaataaacctataatgagtccgcctccaatatagttaccgataaaagccgcagcgatattcgaaatagctggtatgaagtgcaatgtatcaacttgataaattaaaccacccataaataagcaactgttgtaaacgacgtgttcataacccataaaggcgaatatggtaacaccgaacatcatgacaaacatttttgcgagtacatcgtcaatttgcatggcaataactaatgaaatattgataaagaaattggcgaagatcgctttcattaatatacttacaaaaccagtagacaacgttttgtgctcaataactgctgataactgatttaacatatctggcgtcattacatttgaaaaacgcatgaaactaaataaaatagcagcacctaaaatatttcctgcaaagcataataaaaatattttcaatactctagtcggtttaattactttataatacaggcctacagtaaagtacatgaagttactggttagtagttcggagtttgtaaataaaatgagtactaacgcaaagctgaatgtaatggcgctagccatattcactatacctggtggtaaatctggttcgtgtgttgctttaactgatagcacgaagaccgtaataataccgataataaatcctgccatcatcgcgcgtaataaataacgttttaaataaacgctttgtaatatatcttttgttcttattgtttcgactacgttatttacccagtcatccccataaaaaatcttatcccatttaatatgtttctccttcacaatgacatcctcgcttttcatttgttaatcagagtatactatgaatcgtcttatttgtgaataatttcacaaaattaattttaaaaactaatatttttgaataactgataggattttttggtaaatcaattattttaaaataatcaatagacagacagtatcgctgaaaatccatgaatttcatataaaaaagcctagtaacgagggggcaatcattactaggcagtgagcatttattaagttgtcgcttgtttcggacgacgtataactacatcgatgatgaaaccgataatagcaaagagcatgaatggtacaagccaagctaaatcgatatctgctaaaggtaacatcataaaccatttcaaaataacaccgtgtaataagttgaaactatttagtatttgtaaaattgaaataatcaatgtaataacagttgcgagtcgataggcccaactgaatctgaatgtgctaaacatgttagcaaatgatatcagtacaagtgcaatagacacgggatatattaatgtcaacaatggtacagcaatttttaaaatcatttctaaaccaagtgttgtaaataagaaccctatgatagagaaaataagtgcgaatattttataagaaaacttaggtacgtgtttcttagtaaatgtggcgcaagcattgacgagtcctatacatgttgttaaacatgcaagtatcactgtcataccaaatactatgttgccaaatgaaccaaatactcgtaatgagttgtacgtcaatatatctgtaccatctttaaagtttcctggagctgttgatgccccaacgtatgcaagtgcaaagtaaatcattccaagtaatatggctgcaataagacctgaaaagcagacatattttaaaattttcatgcgatctgtgaggcctttaaacttataaccattgacaatgactacggaaaaagctaacgcagcaacaagatccattgtaaaatagccttccaaacttcctgaaatgaaaggatgtgttatatatttatccttaggtgcacttagtgcagattcagggttgaaaatgacagcaatacttaatagagcgaccattaatagtaataatggtgttaataatttacctaaattatcaacgattttcgatggatttaaactaatccagtaaacgatggcaaaaaagattgctgcgaatataattaaagtccattggttatgcacaggtaaaatgtgtcttgtaccaatttcgtacgcgacatttgcagcacgtggaataccgtaaaatgctccgatagacatgtaaatcacgacagcaaaaataaacccgaaccatggatgtatacgattgcctacactttcaacaccttcatcataaaatgcaacaacaataacagtaataaaggggagtaatatgcctgtaagggcaaagcctagcataccaatccacatattttgacccgctgtatggccaagaatgggcgggaatattaaatttccggctccaaaaaatagtgaaaataacatgaggcccgaaataataacttgttttttcaatgtaatttccttcctaaaactagatattcataataatttaaaaaatctgaaaaataaaaatgttcttactttatctttaaatgacaatactatgattctattattttataaaaaagattgcaataataacgtcttgctattattggataatgacaattaaagtgtcgtttttatgaattaaaataggtgaaagtaagttggaaatacgttggagcgttgtgatttttatgagaaattgtatgagtgaggactgctatttataaaaggtaaactatggatgagtttatggttgttccaataggtaaataagagatagcacattgtacacataatgatacgtggatgagtgaatatgtctgataggaaggcctagtcactcaaatgaatttaagtttattacgtgataaatcacaaatctctctcatgtgataggtctcccattaaatcatgcttatatgaaatgttcacatatttgttagcttttcaagaaataatattaaatatcttttcatagtatagcaatattaaataaatgcatttataattttaactgtattttaaatattaatcatgaggtgataagatgaataaaatttcaaagtatattgcaatagcatcattatcggtagcggttacagtttcagcaccacaaacgacaaattctacagcgtttgccaaaagttctgctgaagttcaacaaacgcaacaagcttctataccagcatcacaaaaggcgaatcttggtaatcaaaatattatggcagtggcttggtatcaaaattcagctgaagcaaaagcattatatttacaaggttataacagtgcaaagacacagttagataaagagattaaaaagaataaaggtaaacataagttagctattgctttggatttagatgaaacagttttagataattctccatatcaaggctatgcatcaatacataataaacctttcccagaaggttggcatgaatgggtacaagctgctaaagctaaacctgtctatggcgcaaaagaattcttgaaatatgctgacaaaaaaggtgtcgatatctactatatttctgatagagataaagaaaaagatttaaaggcaacacaaaagaacttaaaacaacaaggtatccctcaagctaagaagagtcatattttactaaaaggtaaagatgataagagtaaagaatcacgcagacaaatggttcaaaaggatcataaacttgtcatgctatttggagataatttattagactttacagatccaaaagaagctacagctgaatctcgtgaagcattaattgaaaaacataaagacgatttcggtaagaaatatatcattttccctaacccaatgtatggtagttgggaagctacgatttacaacaataactataaagcaagtgacaaagcaaaagataaattacgtaaaaatgctattaagcaattcgatcctaaaacaggcgaagttaaataatatatgaattggacgtctacatgtacttaaaggtatatgtaggcgtttttaaattgatccttaattttaaatgtaccgtacaaaaataatagacaattaattgcattttccataaatttgcttttaatataaaaagttcgggtataatgaaggataagtgtatgtataacattacagagcgcaacacgacgtacgtgcatctaagaatataaacaatgtttaaatcatagtagtagggagagaaatgcatgtttttagcttggaatgaaatacggcgcaacaaattgaagtttggactaattattggtgtgttaacgatgattagttacttgctatttttattatctggattggcgaatggtcttatcaatatgaataaagaaggcattgataagtggcaagcagatgccattgttctaaataaagatgccaatcaaactgtgcaacaatctgtttttaacaagaaagatattgaaaataaatacaagaagcaagctactttgaagcaaacaggggaaattgtgtctaatggccatcaaaaagacaatgttttagtgttcggtgttgaaaagtcatcatttttagttccgagtttaatagaagggcataaagcgactaaagataatgaagtgttagctgatgaaacgcttaaaaataaaggatttaaaattggtgacacattatcactatctcaatcagatgaaaaattgcatatcgtaggttttacagaaagtgcaaaatataatgcgtcaccagtcattttcacgaatgacgctaccattgccaagatcaatcctagattgactggagataaaattaatgcagttgttgtacgtgatacaaattggaaagacaaaaaattaaaccaagagcttgaagcggtaagtattaatgactttattgaaaatttaccaggttataaaccacagaacttaacattaaactttatgatttcattcttatttgtcatttcagctacagttataggcattttcttatatgtcatgacattacaaaaaacaagtttatttggcatattaaaggctcaaggatttacgaatggctatttagcgaacgtagttatttcgcagacgctcatattagcattatttggtacggcatttggcttactgttaacaggcgttacaggtgcatttttacctgatgcagtacctgtcaaattcgatgtactaacattgctcgtatttgcaattgtgttaatgattgtctctgtattaggaagtttattctccattttaacaattagaaaaatagatccgttaaaggcgattgggtaggaggtgtagcaaatgttgaaatttgaaaatgtaacaaagtcatttaaagatgggaatcgtaacattgaagcggttaaagatacaaattttgagataaataaaggtgatattatagcattggttggaccttctggctctggtaaaagtacatttctaactatggcaggtgctttacaaacgccgacatctgggcacattttaatcaataaccaagatattacgacaatgaagcaaaaagcattggcaaaagttagaatgtctgaaataggttttattttacaagctacaaaccttgtaccatttttaacggtaaagcaacaatttacattattgaaaaagaaaaataagaatgttatgtctaatgaagactatcagcaacttatgtcacaattaggtctaacttcattgcttaataagttaccttcagaaatttcaggtggtcagaaacaacgtgtggcgatagccaaagcgttatatacgaatccgtcgattattttagcggatgaacctaccgcggcgttagatactgaaaatgcgattgaagtcattaaaattctacgtgatcaagccaaaaaaagaaagaaagcatgtattattgttacacatgatgaacgacttaaagcatattgtgatcgttcatatcatatgaaagatggcgtccttaatcttgaaaatgaaacagtagaatagttttattaagccggtacatcatgtgccggtatttttatgtttatgtattatttgaataaactttcacattcaattaataataattattatcgaaaattagaaatattccgtgaaatataatattttttgtagtaaaatggcctctaagtattcaatatttaaatatggggattgaatataaaattatcgtaatgggggtcaatggttatggatttaatgataggtactttatttttatttttggtcttagtgatttttacattatttacatataaagcacctaatggtatgcgtgccatgggagcattagctaatgcagcaatcgcaacatttttagtggaagcatttaataaatatgttggtggcgaagtattcggtattaaatttttagaagagctaggagacgctgcgggaggtctaggtggtgtcgctgccgctggattaacagcattagctatcggtgtatcaccagtatatgcattagttatagcagccgcgtgcggtggtatggatttattaccaggtttctttgcgggttatatgattggatatgtgatgaaatatacagagaaatatgtgccggatggtgtcgacttaattggatcgattgtcatcttagcgccattagctcgtcttattgcagtattattaacgccagtagtgaatagtacattgattcgaattggtgatattatccaaagtagtacgaatacgaatccaattatcatgggtatcattttaggtggtattatcacggttgtcggcacagcgccattgagttcaatggcattgacagcattattaggtttaacgggtgtacctatggctattggtgccatggcagcatttagttcggcatttatgaatgggacgctattccatcgcttaaaattaggtgatcgtaagtctacgattgcagtaagtattgaacctttatcacaagcagatattgtatcagccaatccaattccaatctatattacaaatttctttggtggtgcgattgctggtttaattattgctatgtcaggtttaattaacgatgcgacaggtacagctacaccgattgcaggatttttagtaatgtttggatttaatcatccaatgactattgtaatttatggtgtagtaatggcgattgtaggtgcgcttgcaggttatcttggttcaatcgtatttaaaaaatatccaattgttactaagcaagacatgattaatcgaggtgcagttgacgcatagcatcatcatattgaatagtaaaaacaaataaaacatagtaacgtgattcagtcgatgaaaaaatcgataatgagtcacgtttttttatagaaaaatataagacataaaaatgtcataatttattgtcgacaaatatcatactgtataaacatttatcattttctcaagtaccttttacacgatggaatgaacttactttttacgaaattatgcgtattttataaacaaatatcattgatataacggcaaatgtaagcgtttacaacagaaataacagcatgctacgatatttttgtaaattcactgattcaagtattttaagtcaatatgaggagggatgttatgagcgattctgagaaagaaattttaaaaagaattaaagataatccgtttatttcacaacgtgaacttgctgaggcaattggattatctagacccagcgtagcaaacattatttcaggattaatacaaaaggaatatgttatgggaaaggcatatgttttaaatgaagattatcctattgtttgtattggcgcagcgaatgtagatcgtaagttttatgtgcataaagatttagttgcagaaacatcaaatcctgtaacgtcaacacgctctattggtggcgtagcaagaaatattgctgagaacttaggtaggcttggcgaaacggtcgcttttttatctgctagtggacaagatagtgaatgggaaatgattaaacgattgtccacaccatttatgaatttggatcatgttcaacaatttgaaaatgcgagtacaggttcatatacagctttaattagtaaagaaggcgacatgacatatggcttagcagatatggaagtgtttgactacattacgcctgaatttttaattaagcgttcacacttattgaaaaaggctaagtgcattattgtcgatttgaatttaggcaaagaggcattaaacttcttatgtgcctataccacgaaacatcaaatcaaattagttatcaccacggtttcttccccaaaaatgaaaaatatgcctgattcattacatgctattgattggattatcacgaataaagatgaaacagaaacatacttaaatttaaaaatagaatctactgatgatttaaaaatagctgctaaacgctggaatgatttaggtgttaaaaatgttattgtgacaaatggcgtgaaagaactcatttatcgaagtggtgaggaagaaatcatcaagtcagttatgccatcaaatagtgtgaaagatgttacaggtgcaggcgattcattctgtgctgcagtagtatatagctggttaaatgggatgtctactgaagatatattaattgctggtatggttaacgcaaagaaaacgatagaaacgaaatatacagttaggcaaaacctagatcaacagcaactttatcacgatatggaggattataaaaatggcaaatttacaaaagtatattgagtattctcgagaagttcagcaagcacgggagaacaatcaaccgattgtagcattagaatcaacaattatttcgcatggtatgccgtacccacaaaatgttgaaatggcaacaacagtagagcaaattatcaggaataatggtgccattccagcaaccatagccattatagatggcaaaattaaaattggtttagaaagcgaagatttagaaatactggcaactagtaaagacgttgctaaagtatctagaagggatttagcagaagttgttgcgatgaagtgtgttggtgctactactgtagcgacgacgatgatatgtgctgcaatggctggtattcaattttttgttacaggaggtattgggggcgtccataaaggtgcagaacatacgatggacatttcagcagacttagaagaactgtctaaaacaaatgtcactgttatctgtgcaggtgccaaatcaattttagacttacctaagacgatggagtatttagaaacaaaaggcgttccagttattggatatcaaacgaatgaattgccagcattcttcactcgcgaaagcggtgttaagttaacaagttcggttgaaacgccagaacgacttgctgacattcatttaacaaaacagcagttaaatcttgaaggtggcattgttgttgctaatccaattccatatgagcatgccttatcaaaagcatatattgaggcaatcataaatgaagctgttgttgaagcggaaaatcaaggtattaaaggtaaggacgccacaccgttcttgttagggaaaattgtagaaaaaacgaatggtaaaagtttagcagcaaatataaaacttgttgaaaacaatgcggcgttgggtgctaaaattgctgtcgctgttaataaattattgtaggtgatgatacatgaatattttattcgctatcacagggatagcatttgcactatttgttgcgtttttattcagttttgatcgtaaaaacatagacttcaaaaagacgttaataatgatatttattcaagtgttgattgtgttatttatgatgaacacaacgattggtttaacaatcttaactgcattaggctcattttttgaagggttaataaatgttagtaaagcaggtataaactttgtttttggagatatacaaaataaaaatggctttacgttctttttaaatgtgttactgccattagtgttcatttctgtattaataggcatttttaattatattaaggtattaccatttattatcaaatatgtaggtatcgctattaataaaataacgagaatggggcgcttagaaagttactttgctatttcaacagcaatgtttggacaaccagaagtatatttaacaataaaagatattattccaagattatctagagcgaaattatatacaattgcgacgtctggtatgagtgctgttagtatggcaatgttgggttcatatatgcagatgattgagcccaagttcgtagttacagctgtaatgttaaatatttttagtgcgcttatcatcgctagtgtaatcaatccctataaatctgatgatagtgatgttgagattgataatttaactaaatcaacggaaacgaaatcagtgaatggaaaaacaggaaaacctaagaaagttgccttcttccaaatgataggtgatagtgcgatggatggatttaaaatcgctgttgtagtagccgtaatgttgttagcatttatttcattaatggaagcaattaatatcatgtttggtagtgttggtttgaactttaaacagcttattggctatgtgtttgcaccaatcgcattcttaatggggattccatggagcgaagctgttccagctggctctttaatggcgactaaattaattacaaatgagtttgtagcaatgcttgattttaaaaatgtcctgggtgatgtatctgctcgaacacaaggtatcatttcagtttacttagtaagcttcgctaattttggtacggttggtatcatcgtaggttcaattaaaggcattagtgataaacaaggagaaaaagtttcatcctttgcaatgaggctgttacttggttcaactctagcttcaatcatttcaggatcaatcattggcttagtattgtaaattaatcgaagtatctaaattaaattcatggcaaagctaaaccccatcaccaagttggcgcaacagcgcatcataacttggtgatgggattttatcataacaatctacttattcgtagccgtttttgaaatgtatgttgatggtttatctttttcaaaaattgttaatcccgttatatcttttttatgttttgaagggacaatgaagctaagtatataagcaaagacaaaagcaactgtaaatgaaatggtagatacatagaaaggtgagttacctttgccaacaccattatagacataagcaaagatgatacccaatattaatccacaaataacaccgaatgtattcgtacgtttagtgaaaataccaactgcaaatacaccagctaatggaacaccgaataatccagttacaaacaagaataaatcccataagtcatttgaattagaagcaattaagtatagtgacattccaaaaccgaaaatacctgcaatgatgataatgaaacgtgcaaagttaacttcgtgtcgctcgctatcttttccgaagaagcgttgcttaatgtcgattgaaatacaagcagatatagaatttaaactagatgaaatggtagactgtgcagcggcgaaaatggctgcaataagtaatcctgctacaaatggtggcatctcagtcaaaatgaaatatggcactacagatgatgtattgaagccttttggtaaaacagcttcatgtgtataaaatgaatacagcattgtacccataccataaaataagggtgctgaaattaaagctaggataccatttgtccataacgatttatttgtttcttttaaactatcagaagcttgataacgctgtacgacgtcttgactcgctgtgtattgatacaagttgttgaaaatatttcctaggaaaataattggaatggcagctgccgcagtatttagtttccaattgtctgcactaattaattttttgtgctcaatcgcatctgcaaagacagtgccaaaaccgcctttaatgttcataacacctagaataataataactaaagcgccgcctaataaaatgacgccttgaatgaaatcactccaaaccacaccttcgaaaccacctaaaaatgtatataaaatacatagtaaacctacgagtgatgcaacgatataagggttcatgtctgatacagatgtgattgctaatgttggtaagtagataacaattgcaacacgccctaaatggtaaacgacaaataataatgagccaatgacacgtatgctagggccaaatctagcttctaaatattcatatgcagatgttacctttaactttttaaagaaagggacatagaaataaataagtaatggaataattgcgacgatagcaatgttaccagcgatatatgaccaatctgttaaaaatgctttctctggtgtagacataaatgtaatcgcacttaacgtagtagcataaattgaaaagccaactacccaagatggcaagcgaccacttgcggtaaagaaactattggtactttggctcgcgcgcttggtaaaataaacgccaatgaacaacatagctagtagataaatgataacggcaacccagtttagtgtgccaaatccaacttctttcatgggcaacatcccctttacaatgtattgattctttgatgtctataaatcgtattttgcaatgagttgatctaatgtttgtcgatgtgcttcgttaaaaggtttgaaaggtcttttcggtaatcctgcatcaatgtcacgatgacgtaatatttctttcaatgttggataaatccccattgataacactgtttcgataatgtcgtttgaatcatgttgtagttggtaagcttcttgaatttgaccttgtcgtgctaagtcgaagatttttctagcgcggcgaccattaacgttatatgtagaaccaattgcaccatctacgccagaaatcgtagcttgaactaacatttcatcaaagccagataagattaatttgtctgggaatgcttttctaatacgttcgagtaggaagaagttcggcgctgtatatttaacaccaacaattttttcgtgattaaatagctcgctgaattgttcaatagaaatattcacacctgttaaatctggtattgcataaataatcatattgttctgtgttgcttcgataatatcgaaatagtaatctctaatttcttcaaaagtaaatggatagtagaatggtgttacggcagaaagtgcatcataaccgagttctgtggcatattttccgagttcaatggcttcatttaaatctaacgaacctacttgagcaatcaatttcactttatccccaactgcctctttggcaaccttgaaaacttgcttcttctgctctgtatttaataaaaagttttcgcctgagctaccatttacataaagaccgtctaattcttcagtttcaatggcattttgagcaatttgtttaagtccttgttcatttacttgaccattttcatcaaaaggaacgagtaacgctgcatataaaccttttaaatctttgttcattatgaagtccctccaaaaatcatttgataatatagtttacagctataattgtaaacgctatcataaaatgtaacaatatctttttgaaaattgtagtcatatttatgtataattaatgaaaatgtttttcaaaatcaatagaaatggagtgagtaaggtgtattacatcgcaatcgatattggaggcactcaaattaaatcggcagttattgataagcaattgaatatgtttgactatcaacaaatatcaacgccggacaacaaaagtgagcttattactgacaaagtatatgagattgtaacaggatatatgaagcaatatcagttgatccaacctgtcataggtatttcatcagcaggcgttgttgatgaacaaaaaggcgaaattggatacgcagggccaaccattccgaattataaaggtactaattttaagcgattattaaaatcactgtctccttatgtcaaagtaaaaaatgatgtaaacgctgcattactaggcgaattgaaattacatcaatatcaagcagaacggatcttttgtatgacgcttggtacaggcattgggggtgcgtacaagaataatcaaggtcatattgataatggtgagcttcataaggcaaatgaagttgggtatttattgtatcgtccaactgaaaatacaacgtttgagcaacgtgctgcaacgagtgcattgaaaaagcgcatgattgacggaggatttacgagaagcacacatgtgccagtattgtttgaagcagctgaagaaggtgatgatattgcaaaacaaatattgaatgagtgggcagaagatgtagcagaagggattgcccaaatacaagtcatgtatgatccagggcttatattaattggtggcggtatatctgaacaaggagacaatctcattaaatatatcgagccgaaagttgcacactatttaccaaaagactatgtttatgcaccaatacaaacgactaagagtaaaaatgatgcagcattatatggctgtttgcaatgatagttgaaagaaggagtcattctaaaatagaatttgaaaccgttacgagagatgagagctgttgttagttccacacatcacactctatctaggaccaatctaaactatatcaaccaacagtgtgccacgggcatattaaattgaagacggttgaacgtatagatctcaaaaatgtaaaaaagtatttggtattgaaattaaaaaagcacctagcaactcgttaggacaatcacgatgattgtctacagttgcaggtggatttgaatatactactagttatttgttgtctaggataatagatttagtatgttgataagtttgactcagatttgtattttctaataaatgataactcacgatatcgattaaaaagagtgtcgcaatttgtgtgttgataaattgatggtcggtattacgcgattgatccgttgttaaaagtactaaatctgcacaatctgtaagtttactaccttcgaaatttgtgatggcaacgacatatgcaccatgagatttggcgacttccgctgctgaaattaattccgaagtattaccactatttgacatagcaataaacatgtccgaatgagatagtagggatgccgatattttcattaaatgtgaatcggtagtaacattaccttttagccccatacgaatcatacgataataaaattcagtcgctgataaaccagagctacctagtccagcaaagagtatatgtcgacttgattggagtttgtcgataaaggtttggataatgtcgttatcaataaattcaccagtttgttgaatgatttgttgatgatatttatgaattctttgaataattgggctattttcaataactgtctctgtcatttcttgttgaatattaaattttaaatcttggaaattctcataatctagcttatgactaaagcgtgtcatcgttgctggtgatgtaccaatcgcatgggctaaggagttaatcgttgaaaaggcatcgctataaccattttgtcttatataattgacgatgcgtttatcagtttttgtaaataaatgttgataacgttgaacacgattctcaaatttcattgtgtcaccccttcatcttaatgattactattatatatgaaaaatattttcaagatagtaaaaagcattgataaaaattatcttaatgatatattgtaaatgactttacgtgaaaaaacgacttatggagtgaggaataatgttaccacatggattaatagtatcttgtcaggcactagcagatgaaccattgcattcatcttttattatgtcgaaaatggcattagctgcgtatgaaggtggtgctgttggtattcgcgcaaatactaaggaagacattttagcaattaaagaaacggtagatttaccagttattggcattgtgaaacgtgactatgatcactcagatgttttcattactgcaacgtcaaaagaagttgatgaactgatagaaagccaatgtgaagtcattgcattggatgcaacgttacagcaacgtccgaaagaaacgttagacgaattagtatcatatattagaacacatgcaccgaacgttgaaatcatggctgatatcgcgaccgttgaagaagctaaaaatgccgcacgacttggctttgattatattggcacgacgttacatggctatactagttatacgcaaggacaattactttatcaaaatgacttccaatttctaaaagatgtactacaaagtgttgatgcaaaagttattgcggaaggtaatgtcattacaccggatatgtataaacgcgtgatggacttaggcgttcattgttcagtcgttggtggtgcgataacacgaccaaaagaaattacgaaacgttttgttcaagttatggaagattaaatgataacgataaaaaaacgagatgaccatcattaattaaaggtacctaattatcttaggtggctgaatgaatgtaatgggttcatctcgttttgtttgtttacgatagtgattttattttcaatttgaattatccaaaaataagtaaagcgacggggatggtgattaatagcgacaatgccacgcgtaaaaaccaaatgatgatgagtttccagacaggtattttaatttcagttgctagtatacatggcactaatgctgagaaaaagataatggctgatacgcttactacaccgacgacaaatttagtactcattgcagctttagttactaacaaagatggtagaaacatttctacaatagaaatcgctgacgcttttgcaagtacagcctgatcagcaattgggaaaatataaataaatggatagaatatatagccaagccaatcaatgaatggtgtatagttcgctacaatcagtcctaaaaaaccaatcgataatatagaaggcaaaataccaacagtcatttctaaaccgtctttaaaattgtcccaaacgttcttcacgagagatggtgttaatgcattttgtttcatcgcctctgcatatgcagttttcagtctgcttccttcaatagcaacttcttgttctccttcttgtccgttataatattctgttgattcattggtgattggcggtagccatgcagtaattgcagtcacgacaaatgtgatgactaaagttatccaaaagtataaattccaatgcggcattagccctaaagttttagcaacgataatcataaaagttgctgaaactgttgaaaagccagtcgcaataatcgtggcttctcgtttgttgtacatcccttgcttatagacacgattagtaatcaataatcctaaggaataactgccgacaaacgaagctactgcatcgacagcggattttcctggtgttttaaaaataggtctcataataggctccatataaacaccgacaaattctaataagccatagcctactaataaagaaagcgcaattgcacctactggaattaagatacttaatggcatcattaatttttcaaacaagaacggaccatagttagctttaaatagtattgatggaccgattttaaatacatacattataccaatcattgcacctgcaactttaaataatgtaatgaccaagtttgtgattgaagtcataaaagtacgtctcactattggtaacgctgtaccaattaaaatcataatcagtgcaacatagggcataagtggacctatgattgagcgaatggctagatgaacatgatcgacgaaaatagtgttgttaccattaatcgtaaaaggaataaagaaacatagtatgcccactaaactatagacaaaaaaacgccatgcacttggttgttgtgcattagaatgatattgattcattaaagcaacccctttgtttaaatgaatacacaaaactgtatgatgcatcttccccttaatgagatgaatcattattttaatttagaaaaatctgaaaacttactataattgtatagtttgaattattttcataccaatacaaattaactaattatatatagattgaaactatattacttaataaaatatttatcttaaatgttgttgtgttgattcaacgccacaactaaaagtgtttataaattatttggaaatgcacatatttgtaaatgattagtatcgatttaatatcgtattattaaatttttattaattttgtagtcttaatcaaaaaataatatatgtcatgttatattgaaggtgcagttgtttttcattctcaagagggggtcaaaaaaatacttttgaggtgattatatgttaagaggacaagaagaaagaaagtatagtattagaaagtattcaataggcgtggtgtcagtgttagcggctacaatgtttgttgtgtcatcacatgaagcacaagcctcggaaaaaacaccaacgtccaatgcagcggcacaaaaagaaacactaaatcaaccgggagaacaagggaacgcgataacgtcacatcaaatgcagtcaggaaagcaattagacgatatgcataaagagaatggtaaaagtggaacagtgacagaaggtaaagacacgcttcaatcatcgaagcatcaatcaacacaaaatagtaaaacaatcagaacgcaaaatgataatcaagtaaagcaagattctgaacgacaaggttctaaacagtcacaccaaaataatgcgactaataatactgaacgtcaaaatgatcaggttcaaaatacccatcatgctgaacgtaatggatcacaatcgacaacgtcacaatcgaatgatgttgataaatcacaaccatccattccggcacaaaaggtattacccaatcatgataaagcagcaccaacttcaactacacccccgtctaatgataaaactgcacctaaatcaacaaaagcacaagatgcaaccacggacaaacatccaaatcaacaagatacacatcaacccgcgcatcaaatcatagatgcaaagcaagatgatactgttcgccaaagtgaacagaaaccacaagttggcgatttaagtaaacatatcgatggtcaaaattccccagagaaaccgacagataaaaatactgataataaacaactaatcaaagatgcgcttcaagcgcctaaaacacgttcgactacaaatgcagcagcagatgctaaaaaggttcgaccacttaaagcgaatcaagtacaaccacttaacaaatatccagttgtttttgtacatggatttttaggattagtaggcgataatgcacctgctttatatccaaattattggggtggaaataaatttaaagttatcgaggaattgagaaagcaaggctataatgtacatcaagcaagtgtaagtgcatttggtagtaactatgatcgcgctgtagaactttattattacattaaaggtggtcgcgtagattatggcgcagcacatgcagctaaatacggacatgagcgctatggtaagacttataaaggaatcatgcctaattgggaacctggtaaaaaggtacatcttgtagggcatagtatgggtggtcaaacaattcgtttaatggaagagtttttaagaaatggtaacaaagaagaaattgcctatcataaagcgcatggtggagaaatatcaccattattcactggtggtcataacaatatggttgcatcaatcacaacattagcaacaccacataatggttcacaagcagctgataagtttggaaatacagaagctgttagaaaaatcatgttcgctttaaatcgatttatgggtaacaagtattcgaatatcgatttaggattaacgcaatggggctttaaacaattaccaaatgagagttacattgactatataaaacgcgttagtaaaagcaaaatttggacatcagacgataatgctgcctatgatttaacgttagatggctctgcaaaattgaacaacatgacaagtatgaatcctaatattacgtatacgacttatacaggtgtgtcttcacatactggtccattaggttatgaaaatcctgatttaggtacatttttcttaatggatacaacgagtagaattattggtcatgatgcaagagaagaatggcgtaaaaatgatggtgtcgtaccagtgatttcgtcgttacatccatccaatcaaccatttattaatgttacgaatgatgaacctgccacacgcagaggtatctggcaagttaaaccaatcatacaaggatgggatcatgtcgattttatcggtgtggacttcctggatttcaaacgtaaaggtgcagaacttgccaacttctatacaggtattataaatgacttgttgcgtgtggaagcgactgaaagtaaaggaacacaattgaaagcaagttaaattcatcttctgaatttaataggctatgtaaatcgtgctgttatcatggcacatcagatataagtagcatcacagtgttgaatttcaaaatagtaaagtgaaataaagcgcctgtctcattagcgaaaactaaagggacaggcgtatctgtttatgagcttaataaattgtatgaataatatggttgatcgaataactgtttatcatgatgataaattgagttttttaaaataatgatatattacaccattgttatagcgtttaagaaatcaacaactttacgataaatagtgattgcttcgtcattaggtctacgatcaaaatcatgctcgtttttattcacgcgttcaaatgttgaatgtggaacatgattcatgatatgttcgctttcctcaacgggaacatcataatcgccattacaatgcgcaatgaaaacaggtggaagtgttttaagttcatctggtgcaatattatattttgaatcagtataatcagcaatgttaatcatatttatccatttacctgtgccacgtgcataaacgtagattaaaaaacgttgtgcgatttgatcttgaacaaccggtgttggtgaagtgagttgtgcaatcattgtttcgtttatgctttgagctatttttgcgtaataactattagttgttttaaaaggttcagtgttgatgcgactataaccataaaaatcaataacaccatcaatatctctgtctcgtgcaattaatagacttaaatatgcacctgatgatctgccaaaggtaaaaatagggcaattagaatattgtgattgaatcgcatcgaatgatgcgtagacatcctcaataatgcaatcgagacttacttctggtaataaacgataacttagttgaattaaatcgtaatgttccgtaaggatatcgatatactgtggggataaatcgttagctttaccgaacattaatccaccaccgtggatgtagacaataacgccttttgttggttgattttttgctttaataattgtgtaaggtaatgcaaatgcatctttagtaattactttatatttaatttcagtcacgatttaataggctccttatttttgatattgatgtcattataacactgtcttaaatttccatgaaaaatagtcttaagacgatgagtcatgataattctgttccaattgacgtaaagcgtcacgggtatgcttctttagaccttccccataatccatcattttaacaatatctttaaaagcagcatgtggaatggctaaatcttctaaatctgccatagaaaattcaagattgatatcatgtggtcgctgttcagcaagtttatgcacaaagtcaggttctgtgacaaaaggcgaagacatgccgaccatatctgcatgttgtaaagcatctaaagcagactctggagaattaatcccgccacttgcaattaaagggatacgacctgctaaatgttcatagacaatttggttaactggtcgaccgaaatgatcacctggtgtacgagacgtattttgataaatatgtcgaccccagctagcgattgctaagtattggatgtttgaaacgtccatgacccaatcgattaattggttgaactcgtcaatggtatatcctaaatcactgcctctggtttcttctggcgttgctcgaaatcctaaaataaaattgtcaggtgcttctttatcaatcacttcttgtaccgcacgcataacttctaaacataatcttgcacgattttttaatgagtcggcaccgtaatggtctgtacgtctatttgaaaaagttgagaaaaatgtttgaatcagcaaacgttgtgcaatcgaaatttccacaccatcaaaacctgctttaatcgcgcgtaatgtagcatcgcgatactgctgaatgatgctattgattttctcatgagacatggcgataacaacgtgttcaatcggtgaatgcaaagtcataggacttggtccatacacctttccaaaatttaaaatggcttgatttgaaaaacgaccagcatgcgctagctggataatagcgaggctaccatgttgtttcatcgtagatgccatgttagttaatccagggatacaagcatcatgatcaatattaaagccatattcaaacagtttaccataaggttcaatgtaagcagcgccggtgacttgcattccagctgaattagagcgacgtgcagcataagccaagtctgcttttgtaatatagccttcttttgttgatgcgtttacggtcattggtgataatacaaagcgattcgaaattttgatgccattaggtaagtggattgattgtaaaagtggtttgtatcggtacatactatgattccttttctattcaatattgttttcaaagtaccatggaaagaatgaataatcaatgatgaacagtcttgatagaatagaattggtacatggaaaacatttttaaaattgaactaatgaatggcatttgtaggtctgaaaatatgaatatgaaaaagaaaaataaaggcgaaaagatataaaagttaattgaaaaacgttatcatatacgtgggtatatgaagagggaatggtattaagaacgctaaaatgttatgtcggtttgacatgacaggataagtttggagatgacggattggttaaattaagcgtattagactatgccttaatagatgaaggtaaggatgcacaaaaggcattgcaagattcagtgacacttgcaaaattagcagatcgacttggctttaagcgaatttggtttacggaacatcataatgtaccagcgtttgcgtgtagtagtccagaacttttgatgatgcatacattggcgcagacaaatcacatacgagttggctctggtggtgtgatgctgccgcactatcgaccttataaaattgctgagcattttagaatgatggcagcgttatatccaaatcgtattgatttaggtattggtaataatccaggtactactatggtaaagcaagctttagatggaataaatcctacatatgatagttacgatgaatcgatttcgttattacgtgattatcttacaataaaggataaaccaagtgcgcatacgttaggtgtccaaccacacattgatcattttccagaaatgtggttattaagtagtagcgcaacatctgccaaaatagctgccgaactaggtatagggctttctgttggaacatttttgctaccagatataaatgcgatacatgcagcgaaggataacattgatatttacaaaaaacatttccaagcatcaacgattaaaatggacgcaaaggtgatggcatctgtatttgtcattgtagcagataacgaagcggaagtagcagcattgcaacatgccttagatgtttggttattaggtaaattacaatttgcagaatttgaacattttccttcagtagacacagcacaaaagtataagcttaatgatcgagacaaagagatgattcaagtacatcaagcacgcatcattgcaggcacacaagaacaggttaaagcacaattagatgatttcattgctacgtttgaagttgatgaggtgttagtagcaccgcttattccaggtattgaacagcgttgtaaaacattaaaattactcgcggaaatttatttgtagcattttaaatagaagagaaaggatgaagataagatgaaaaagttagccaattatttatgggtagaaaaagtaggagatttgtatgtgtttagtatgacacctgaattgcaagatgatattgggacagtaggttatgttgaattcgtaagtccagatgaagttaaagtggatgatgaaattgtgagtatcgaagcatcgaaaacggtcattgatgtgcaaacgccattgtcaggaacgattattgagcgaaatacaaaagcggaagaagaaccgacaattttaaactctgaaaaaccagaagaaaattggttgttcaaattggatgatgtcgataaagaagcattcctagcattaccggaggcttaaatggaaacgttaaaatcaaataaagcgagacttgaatatttaatcaatgatatgcgtcgagagagaaatgacaatgacgtattggtaatgccatcttcatttgaagatttgtgggaattatatcgaggcttggcaaatgtcagaccggcattacctgtaagtgatgaatatttagctgtacaagatgctatgttaagtgatttgaatcatcaacatgttacggatttgaaggatttgaagccgataaaaggtgacaatatctttgtttggcaaggtgatatcacgacgttaaaaatcgatgctattgttaatgctgcaaatagtcgttttctaggatgtatgcaagctaatcatgactgcattgataatattattcatacaaaagcgggtgttcaagttcgacttgattgtgcagagatcattcgacaacaagggcgcaatgaaggtgtaggtaaagccaaaaaaacacgtggatataatttgccagcaaagtatataattcatacggttggtccgcaaatacgtcgattgcctgtttcaaagatgaatcaggacttgttagctaaatgttatcttagctgtcttaaattggctgatcaacatagtttaaatcatgtcgctttttgctgtatatctacaggtgtatttgcttttcctcaagatgaagcagcagaaattgctgttcgaacagtagaaagctatctcaaagaaacaaattcaacattgaaagtcgtgttcaatgtatttacagataaggatttacaactgtataaggaggcattgaaccgtgatgcagagtagtaaatggaatgcaatgtctcttttaatggatgaaaagacaaagcaggctgaagtattgcgtactgcgattgatgaagcagatgcgatagtgattggaattggtgcaggcatgtctgcatctgacggatttacatatgtaggagagcgttttacggaaaatttcccagattttattgaaaaatatcgcttctttgatatgttgcaagcgagtttacatccttatggcagttggcaagagtattgggcatttgagagtcgttttattacattaaattatttagatcaacctgtaggtcagtcttatctcgcattaaaatccttagtggaaggtaaacagtaccatatcataactacgaatgcagacaatgctttcgatgctgctgaatatgatatgactcatgtatttcatatacaaggggagtatatactgcaacagtgtagtcagcattgtcatgctcaaacgtatcgcaatgatgatttaattcgtaaaatggttgttgcgcaacaagatatgcttataccttgggagatgattccaagatgtccaaaatgtgatgctccaatggaagtgaataaacgtaaagcggaagttggcatggttgaagatgctgaatttcatgcgcaactacaacgttataatgcttttctagagcaacatcaagatgataaagtgttgtatttggaaattggaattggttatactacaccacaatttgtgaagcatccttttcagcgtatgacacgtaaaaatgaaaatgcaatttatatgacgatgaataaaaaggcatatcgcattccgaattcaattcaagaacgtaccatacatttaactgaggatatctcaacattgattacaacagcactccggaacgacagtacaacgcaaaataacaacattggagagacagaagatgtacttaatagaaccgattagaaatggagaatatattactgatggtgcgattgcactggctatgcaagtttatgttaaccagcatatctttttagatgaagatattttattcccttattattgtgatccaaaagtggaaattggacgttttcaaaatactgctatagaagtgaatcaagattatatagataaacacagtattcaagtagttcgccgagatactggtggtggcgctgtgtatgttgataaaggtgccgttaatatgtgttgtattttagaacaagacacttcaatttatggtgattttcaacgattttatcaaccagctataaaggcattgcatacattaggtgcaacagatgtgatacaaagcggtagaaatgatttaacattgaacggcaaaaaagtgtcaggcgccgcaatgacattaatgaacaatcgtatttatggcggttattcgctattacttgatgttaattatgaagcaatggataaagtgttaaagcctaatcgcaaaaagattgcatcgaaagggattaaatctgtgcgcgcacgtgttggtcatcttagagaagcactggatgaaaagtatcgtgatataaccattgaagaatttaaaaatttaatggtgacgcagattttgggaatcgatgacattaaagaggcgaaacgatatgaattaacggatgcagattgggaagcgattgatgaattagctgataaaaagtataaaaattgggattggaattatgggaagtcacctaaatatgaatataatcgaagtgaaagattatcatcaggtactgtagatattaccatttctgttgaacaaaatcgtatcgcagattgtcgtatttatggggatttctttggacaaggtgatataaaagatgtggaagaagcattacaaggaacaaaaatgacaagagaagatttaatgcatcagttaaagcaattagacatcgtttattattttggtaatgttacggtagaatcattggttgagatgattttaagttaatattgtttaggcgttaatgtcacaccctcaatgaatatgtgtatttgcttttaaaatggtgactatgtagttatgtaatttgattatacgattgaaaatgaatttagttaattagcaaagacatcatatttatagcgtttgtgtttattagtgattgggtatttgaaaatggttaatgatagtttttaaaggaataaattcattttcatttatataagtaagattaaatactagctactaaagtctatttatatacgtcaaaatataatgactgctataatgagtaatcaatagacacaaagaggagattatgtgatgaataataaagtattagtaaccggtggtacagggtttgttggcatgcgaattatttcacgattattagaacaaggttatgaggtacaaacaacgatacgtgatttaagtaaagctgataaagtaattaaaacaatgcaagacaatggcatttccacagagcgattaatgtttgtcgaagcggatttatcacaagatgaacattgggatgaagcaatgaaagattgtaaatatgtcttgagtgtagcatctccggtgtttttcggtaaaacagacgatgcagaagtgatggcgaagcctgccattgaaggcatacaacgtattttaagagctgcagaacatgctggcgtgaagcgtgtggtgatgactgcaaactttggtgcagttggttttagcaataaagataaaaattcaatcacaaatgaaagtcattggacaaatgaagatgaaccaggcttatcagtatatgaaaaatcaaaattgttagctgaaaaggcagcgtgggattttgttgagaatgaaaatacaatagtagaatttgccacaatcaatccagttgcaatttttggaccatcattagatgcacacgtttcaggaagtttccacttgttagaaaacttattaaatggttcaatgaaacgtgtaccgcaaattccattgaatgttgttgatgtgagagacgtagctgaactacacattttggcaatgacaaatgaacaggctaatggcaagcgatttattgctacagctgatggacaaattaatttgttggaaattgcaaaattaattaaagaaaagagacctgaaatagctcaaaaagtttctactaaaaaattaccagactttattttgagtctaggtgctaaatttaatcatcaagctaaagaaggtaaacttttattagatatgaaccgcaatgtaagtaacgaacgtgcaaaaacattacttggttgggaaccgattgcgacacaagaagaagcaattttagcagcaattgatagtatggctaaatttcatttaatataatacaaaaacaccgtccataagtaagtggctttcctcttgataaaagaggcattcactcaatatgtgacggtgttttatatatttacgttaacactattgctgtggcttttgacggccttttaataaaattgctgtcgcacctacgataataataaatagaatcgcaccaaataatcccatatattttactgcgttaccgaacacgataccgacagttaaaaagtctgtatctgagaatgttgttgcagcaccacctaattcgcctaaaaatggcaagaataataatggtaaaaacgtgattaggataccatttagagcggcgccagcaacagcacctttaataccgcctcttgcattaccgaatacagcagccgttgcacctaagaagaagtgtgcaactacgccaggtaaaatgacgacgccaccaaataagaataagataaacataccgatgacacctgtaataaagctgacaaagaatccaattaatactgcattttgtgcataagggaacacaatagggcagtctaatgcaggtttagaatttggtacaagcttttcagaaattcctttaaatgctgggacgatttcagctaagattaaacgaacgcccgttaaaataataaatacaccagcagcaaatgtcacaccttgaattaaagaaaagacaataaagttttgaccatcactaatagattcgtgtacataactaacgcccgcaaataagcatgcgatgaagtaaagtaatgccattgtaatcgagatactaattgtactttctcgtaagaaacttaagccttttggaaatttaatctcttccgttgatttagacttacctttgaataattgacctacagcacctgcggcaaagtaactgattgagccaaaatgacctaacgctacttggtcattccctgtaatttttcgcatcgtaggttggagtaatgcaggtaatactgccatgattaatcctaatacgagtgcgccgataacaattgttagccagcctttaatatgactgactgttaaaatgattgctaaaaacgcagccatgtaaaatgtatgatgacctgttaaaaagatatattttaaattagtgaagcgagcaattaaaatattaacaatcatgccacagaccatgatgagtgcagctgttgttccaaaatcttttaaggctagtgagacgatagcttcgttgttaggtacgataccttgcacaccaaatgcgtgttggaatattttgccgaatggttcaagagatcgaacgacgacatcagcacctgcacttaaaattaagaagcctaatatcgttttaatggttcctgaagtgatcgttgcggcaggttttttctgaacgattaaacctataaaggcaatcagtgcaacaagaatggctggttgacttaaaatatcgactataaaattaaggattgcttgcataggtcgtacctcctttaaatcatgttaagttgttgtaatttttctgagagcttttgttgtaattcagctttatctaaaatattatcaagaactaagacatcccctaggcgttcggcattttcagctaaatctctaccacaaataaacaagtcagccatctctggacttgctgtcataatgtcactatgttcaacttcgatatcagatggtgcattaagttgcctaagtgcttcttgtgcgttcatttctaccataaaactacttcctaaaccgtggccacatactactaaaattttcatattaatcatgctcctttaaaatgtttttaatgtcttgtgcgttttttgcagttaatagttgctggactgtttggttatcgcccagtacggttgctaaattttgtaatacagataagtgtgaatgattgtcgatggcactcaatacaaaaatgagagatgcgtagtgatcttcatcacaaaatgccacatgttgattcaactttaatagacttaaaccaacttgatgtacgtcattgttcggtcttgcatgtgcaattgcaatttcaggtgcgataacgatataaggtccaagttcattaacgctatcaatcattgcttgaacatagccttgttcaataatttgttcttgaagtaatggctgagaagctatagttatagcttcagtccaatcatttacttgttcttttacaatgatgcgtgttgttgacaaaatgtctaatgacacgttattaaacctcctttgtcatagttaaagcaatgtgttgtttaattttaaaaatattcccatctaagaaatcttgtcgatataagtcgttgcttaagcattcgcttaactgtcccaatgcctttaaatgtgcattggggtggtccgttgctaatgtaattacaaggtgaacgggatcgttagctttactaccaaagataatcccttcagtgaaatatgttagtgcgaaacctacaccattctgtacataatcagtaccagcgtgaataagtgcaatatgtggactaatgaccatatatgacccgaattgttcaaattgttttaaaattgcagctgtataatttgaatagacaatgccatcattgattaaaggttgcacagccactgcaattgcggattcaattgataatggttgttcatttataatgatgcgatgttcaggcaataaatctgcgagtgacttgccatcagttgccattttcatgactcgttgttctcttgagtcattgataatttgattcaatttttgacgagattgttgattgataaatggatcgacatgaataactggtacagctgatatttcacaaggtactgttgaaatgacataatcaatgttatcttgcaataatcgactttcttccaattgataaatggaataggcatcccaaatgtgaaactcaggatacagatgatttagttttgattttaaaagttgcgacgtgcctataccagaaccacatagtaagacaaccttaatcattgattgtttatgtgttgcaacacgctctatacttgatgcgaagtgaattgtaatgtatgttaattcatcttcgttgaagcgaatagcagcatcttgttcaattgggctaatatgcttgctaacggcttcaatgatttgaggatagcgacgcataacttcttgcctcaaaggattaggttgtagcatatcgtatttaatacgatgtatagctggtttgatatgtgtgatcagactggtatgcaacttgttgtcttttgacatatcaatgcctaattcttggctaacacaagtgatcaattcatgtatattttgcgataaatcatggtattcaaaggtaattgaagatgctgtatgttcggtcattttagagcctagtaaatgtaacgtgataaagataatttcagactctggaaatgtgacattacaactgcgttctaagttttctatcatttttgaagcaatagcatactgattagtatgtcgccatttatcaatttcattgataggtatatcgaacgaaaaattttcatttaaacgctgaatggcaatgagtatatgatagattaagccatcgatagccgactgaactaaatgataattttcactatttaatgtcttaataatggcacggcgaaccaatgcgattgattctgaattaaagatatccgcctctataaaaggtgcagcttgtttcatatattgatgtataaagtgtgcatacgctttacgataatgatcttcctcaccaataacattgaatcctttattgtggacataatttaactttaaatggtattgatctagttgggcttgaatcattttaatatcatctgcaattgtccgacgcgaaacattaacatcttgcgcaagttgctttgttgaaacaggatcggttgtttcgaataactttaaagcgatatgtgtgagtcgttcatcttttgaaaaatgaatttgatttgttagattgtgctctaattcatttaatagtgtcgcgtgagctgttgttactttgatgcctgcagctttattacggctgacttggtaatgataagtttcagcatattgctcaatatatgctatatcatattgaatggtacgaggtgatacaccaagttgattagcaatggtattgattggaataaacgtttgctcatgaattaaaagatacaaaatttcgatttgtctataacttaacaacgtaatatcctcctatttgtaattgtaagcgatttcttaaaaacgtagatatgcaatctctttcatattttaatccgaaaaattgcatatcaaaatgtttatggcgcaagattttataggaacttttaaaataaattagatattcatgttgacaatttaaaaatgtcgcagtatatttagttagacatctaacgaaatggtggtgcaataaatggaattcacttattcgtatttatttagaatgattagtcatgagatgaaacaaaaggctgatcaaaagttagagcaatttgatattacaaatgagcaaggtcatacgttaggttatctttatgcacatcaacaagatggactgacacaaaatgatattgctaaagcattacaacgaacaggtccaactgtcagtaatttattaaggaaccttgaacgtaaaaagctgatctatcgctatgtcgatgcacaagatacgagaagaaagaatataggactgactacctctgggattaaacttgtagaagcattcacttcgatatttgatgaaatggagcaaacactcgtatcgcagttatctgaagaagaaaatgaacaaatgaaagcaaacttaactaaaatgttatctagtttacaataaatggtaagtgtgactggtagaaatcagtcactttatctttaatattatagttagatatctaattgttagtaagctaattattggaaaagacaaggagtattgaacaatgaaagacgaacaattatattattttgagaaatcgccagtatttaaagcgatgatgcatttctcattgccaatgatgatagggactttattaagcgttatttatggcatattaaatatttactttataggatttttagaagatagccacatgatttctgctatctctctaacactgccagtatttgctatcttaatggggttgggtaatttatttggcgttggtgcaggaacttatatttcacgtttattaggtgcgaaagactatagtaagagtaaatttgtaagtagtttctctatttatggtggtattgcactaggacttatcgtgattttagttactttaccattcagtgatcaaatcgcagcaattttaggagcgagaggtgaaacgttagctttaacaagtaattatttgaaagtaatgtttttaagtgcaccttttgtaattttgttcttcatattagaacaatttgcacgtgcaattggggcaccaatgatttctatgattggtatgttagctagtgtaggcttaaatattattttagatccaattttaatttttggttttgatttaaacgttgttggtgcagctttgggtacagcaatcagtaatgttgctgctgctctgttctttatcatttattttatgaaaaatagtgacgttgtgtcagttaatattaaacttgcgaaacctaataaagaaatgctttctgaaatctttaaaataggtattcctgcatttttaatgagtatcttaatgggattcacaggattagttttaaatttatttttagcacattatggaaacttcgcgattgcaagttatggtatctcatttagacttgtgcaatttccagaacttattatcatgggattatgtgaaggtgttgtaccactaattgcatataactttatggcaaataaaggccgtatgaaagacgttatcaaagcagttatcatgtctatcggcgttatctttgttgtatgtatgattgctgtatttacaattggacatcatatggtcggactatttactactgatcaagccattgttgagatggcgacatttattttgaaagtaacaatggcatcattattattaaatggtataggtttcttgtttactggtatgcttcaagcgactgggcaaggtcgtggtgctacaattatggccattttacaaggtgcgattatcattccagtattatttattatgaatgctttgtttggactaacaggtgtcatttggtcattattaattgctgagtcactttgtgctttagcagcaatgttaatcgtttatttattacgtgatcgtttgacagttgatacatctgaattaatagaaggttaaatatttcgtacacttctggctgagtatatttcggtcggaagggtatttttcgaaaaaaataaatatatgatacgattatgaaaaaataaagtgagattggcatatgtacaaatctaaaatactgttgaaatatatttttagtgaagaatcagaagttaaagatttaactgaagaaaaatataatcaagattacgaagcattaacatttagctttaaagaggaaacatatcaaagtaggttagctaagaaaacaccgactaaagcagggtattttgttacatgttggacgaaagacgagaacaattgtaatcaaccatactcgaaagaggcatttgcagattacttaatgattatagttattgatgaagaattaagcggttattttttatttcctagggaattattggtagaaaaaggtatcttaactacatttgaacataaaggtaagatggcttttagagtttatcctaagtggtgtaatcaattgaataaaacagcagggcaaacacaaaagtggcaatgtaaatattttttgaatactaataaaaagtcatatggttgaacttataagagatgaatatatcatctttcgataagataaccatatgactttattttttatcatttaatgatgaacggtttcttgtcctactttattccaagtgaggataaagctcaacattgcaaacacactgattgctgttaataaaataaaaccgacatcccatccgaatttatcaactacagcacctaagacgatgttggccattacagcaccaaacagataaccaaataatcctgttaatccagctgctgtgccagctgcttttttaggtacataatctaatgcttgtaaaccaattaacataactggtccatatattaagaaaccaatggcaattaatgagacattgtctaaccaagcattgcctggaggatttaaccaataaattaatacaaatactgtgacacctaacataaagaagaaacctgcaggtccacgacgacctttgaataatttatcagaaatgtaaccacataataatgtaccaggaattccagcccattcgtataagaagtatgcccaacctgatgcttttaagtcgaaatgtttttcttcacttaagtagactggcgcccaatcaagtacaccataacgcacgaaataaacaaatatatttgcaaaggcaattgcccatacccatttattgttcagtacatatttaaataaaatttcttttgtagttaattctgtttctaatgttttcttatcgcttgtagcaaagtcgtttttataaatttcgattggaggtaaaccttgagattgaggtgtgtctctaatcaatacgtatgaaattgcggcaatgataagtgctaagagtgcagggtaaatgaatacaccttcgaaaccttttaaataaccaaagttgataaatgctgttgttgtaataccccaagcagcaataggtgccataatacctccaccaacattatgcgcaacgttccaaagggcagtcttacttccgcgttcacttacactaaaccagtgaacgagaacacggcctgaaggtggccagcccataccttgaaaccatccatttaagaataataggacaaacataataccgatacctgatgtaaagaacggtacaaatcccattaacaaattgacgatagcagtgagtgctaatccaagaactaagaatatccgagcattgctccgatcacttacagtacccataaagaacttactaaatccatatgcgatggaaacagcagaaagtgcaaaacctagttccgcttttgtaaaaccttgctcttgcaatgctggcatcgctaatgaaaagtttttacgtaataaatagtacccagcgtaaccgatgaaaataccaagaaatacttggagacgtaatcgtttataggtatcatctatctgattttctggcaaaggcttaatatgctttgcaggtttaagaaaattcataaaatcctccttaatatgtatttatatgcattttgtgcgataaacttatattagacatgtatgaaagcgttgtcaatatacttttgtgaaatcttgcatatttagttattgaagtattttataaacatttagaaaaaataaattgctacacataaatttataattatgcaattattatgtcgttatacatactagctgtgtatctacgaatgagtacaaacatatttttatttgcagaaaaggggtaaatggcatataactatcttttttatgtaagttggtataaaatttatactaataggagggatagtatgaatatagtagggcatcatcacatatccatgtatacaaaagatgcaaaacgtaataaggatttttacacaaatgtccttggattacgattagttgaaaagtctgttaatcaagacaatccttcaatgtatcatttgttttatggggacgaagtaggtacagccggaacaattttaagcttttttgaaattccccatgcgggtcataagcagccaggtactgaaacgatttatcgattttctttattagtaccaaatcaagcggcacttcattattttgaaaaacgccttgataataatggtattacgtctgaacgtttgtactatcttggacaagaaggtgttgtctttaaagatgaagacgacttagaaatcatattgcttgttaatgatagttttgaagtaccacatcaatggcaacataacgcttatagtgaaatacctcaagcatatcaaattttaggaatagggccagtcgaattaagagttagaaatgcagcgcgtacggtagaatttttggaaaatgtcttaggttatcgcaaaagagataataaatcattcgatgtgctgacattagcaccacaaggtttatattcggattttgtagttattgagcaacagggacaacgtgaaagacctggacgaggttatatccatcatattgcaattaatacaccacaaatgagtgacttagatgcaatttacaagaaattacaacaacaaacacaaagtaattcaggtataattgatcgctatttctttaaatcattatactatcgccataattcaattatgtatgaatttgcgactgaagcgcctggatttactattgatacacctcttgaacaattaggaagtcaattgaacttgcctgactttttagaagcagaacgtgaacaaattgaaagtaagttacacgaaatataaaggagaatgtttaatggccaaattagaaatgaataaaaatacgcctcttgagtttggtttgtattccttaggtgatcatttattgaatccatttaaaggtgaaaaagttagttatgagcaacgtattaatgaaattattgaagcaagtaaattagcagatgaaacaggtattgatgtttttgcagttggtgaaagtcaccaggagcattttacaacacaggcacatacggttgtgttaggtgcaattgcccaagcgacaaagcatattaaagtttcaagttcttcaacgattattagtgcaacagatcctgtaagagtatttgaagacttcgcgacattagatttgatttctcatggtagagccgaaattgtagctggcagagcatcaagaacaggtatttttgacttgtttggctatgatttaaaagactatgatgaattgtttgaagaaaaattaggtttacttttagagttaaataaaactgagcgtattacttggtctggaaaatatcgtccagaacttagaaatatgaaaatattcccaagaccaatcgataatatattgccaatatggcgtgctgttggtggtccacctgcaagtgctattaaagcgggaaaacaaggtgtgccaatgatgattacaacccttggtggcccagcaatgaactttaaaggttctatagatgcttatcgtcaagcagcaactgaagcaggtttcgatgcttcgcataagtctttaccagtaagtacagcgagtctgttttatacagctgaaacaactcaggatgctatgagagaattttatccacatttgaatacagggatgtcatttattcgtggtgttggttatccgaaacagcaatttgctaattcgtcagattatcgagaagcgctaatggttggaagcccgcaacaaattattgaaaagatattgtatcaacacgagttgtatggtcatcaacgttttatggcacagcttgattttggcggtgtgccatttgaaaatgttatgaagaatattgagttaattggcaacgaaattataccggcgattaaaaagcatttatcaaaataggaggggcgtcatcatgaatattgtattattgtcaggttccacagtaggttctaaaacgagaattgctatggatgatttaaaaaatgaactagaagtcatcaatgagggacatcaaatagagttgatggatttacgagaacttgaattagaatttagcgttggaaagaattatctagatactacaggagatgtatataaattaacgacgtcgttaatgcaggctgatgtgatttttattggttttccaatttttcaagcttccatccctggtgctttgaaaaatgtgtttgatctacttccagtcaatgcttttcgtgacaaggtaataggacttgtagcgacagcaggttctagtaaacattatttaattcctgaaatgcatttaaaaccaatattgagttacatgaaagcacatacgatgcaaacgtatgtatttattgaagagaaagatttttcaaatcaacaaattgtcaatgatgatgttgtatttcggttaaaagcgttggcacaattcacaatgcgaactgccaaagtacaacaacaagtgtttgaagaagaaaacaaccaatacgacttttaaagtataaaaataagacgctcggcacactaaatttgtatgtgtttgagcgtcttttatattaactatatagccagtgaacgacgataaaggcaagtgatgacaagcatattgaggtaataatgattgtcataagcggtttaagtgcacgatttttaagatctttaaatgcaacatttaaccctaaagcaaccatggccattaataagcaaattgttgatatagtatttaaaatatttaacaatactgatggaatagttacatatgtattcactaaggccataatgacaaatccaattaaaaagtatggaatgcttattcgacccttgctagatgattctgatgaacggaaacgcataattaaaataagtacgatggttaatggaatcagtaagaatactctaccaagtttaccaagaagtgcaattttaagtgcatcactaccaccaaagccaccagctaagacaacgtgcgcaatttcatgaagactaacaccagaccaagcgccataaacatttgtcgtcattgaaaagatagcgtagatagctgtatatataagtgagaatatcgtaccaatcaatgcgatgataccgatactaatagctgtatccttttcacgtgatttgaatattggagcgactgcggcaatagcggcagcaccacaaacgcctgtgccgacacctagtaataatgcgatgtttttgtcaccatgcaacagtttgttgacaaagagcatcattacaatactgaaaataacgacacctacatcgatggctaatagtttactaccttgaccgataatatcgaatatattgagtttaagtccatataggatgattgcaaatcttaataaatatttagatgaaaacgtaatacctgagctatattgttcaggatatcctctaaagtgacgatatagaatagcgattaatatcgcgatagttaatgcgccaaccttatctaagattggcaatttagctgctaaaaagctaaataatgcgactataaatgttaatgatagtccaatcataaaatgcttatttttcaatgatgccatgagcagtgcctcctttaatagcattttagcactgttttgtcgtatttttaaatataaatttggaatggttaataaagtagtgattaaattaagttgtgtgataggtatcaaggacatcaaccaaagtaataggcactacaacgcttattggcggggccccaacaaagaagctgacgaaaagtcagcttacaataatgtgcaagttggggatgggccccaacatagagaaattggatccgtaatttctacagacaatgcaagttggcggggccccaacaaatttaagatacaatgcgtaatattaatatgttattattatgataatttacagaattatatgaaaaatgaatgaggatgtgatggtatgtttggaatgaaagtgaatgaacaaataacattaaaaattttagaagctcatgacacagaagcgcttttcaatttagtcaatcgttcaagaaattcacttagggaatggttaccttgggtagatgcaactgagcaaccatcagatacgcgtgcatttattaaaagaggacttttgcaatttgctgatggtaatggatttcagtgtggcatttggtatgaaggaacgctagttggtgtcatcggtttacatgaaattaatcacatgcacagaaaaacttcattagggtactatttagataaacaatttgagggtcatgggattatgacacaagcagttgaggcattgataaagtattgtttcgaagagcttgacttaaaccgaattgagattagtgccgcagttaataatgaaaaaagccgagctattcctgaaaggctgggatttactagagaaggtatgttacgtgacaatgaattactaaatggtatttattcatcgagttacatctatagtttattaaaatcagaatacgaccaaaaatgacaaattagacttacaaaagagtgatgacatttaaaatggcatcgctcttttatttaatttttgaaaataaaaggttgtttacagtattattttataacaatataatgattttgataattattatcaactagataatgttcatgggaggatgccttaaaatcatcattttaagagccacgtattatcttggcatttagggagtgtgagatagtacgaatgagggcatgtctatggggataatagaatttctataatgaggtgtcaaaatgaaaaagttaacaacgctattattagcatcaacgttattaattgctgcatgtgggaacgacgatagtaagaaggatgattcaaagacatcgaaaaaagatgatggtgttaaagcagaattaaaacaagcaacaaaagcatatgataaatatactgatgaacagttaaatgaatttttaaaaggtacagaaaaatttgttaaagcgattgaaaataatgatatggcccaagcaaaagcgttatatccaaaagttcgtatgtattatgaacgctctgaaccagttgcagaagcatttggagatttagatcctaaaattgatgcacgtcttgcagatatgaaagaagagaaaaaggaaaaagaatggtcaggatatcataagattgaaaaagcattatacgaagataagaaaattgatgatgtgactaaaaaagatgcacaacaattattgaaagatgcaaaagaattgcatgccaaagctgatacattagatatcacaccaaaattaatgttacaaggttctgttgacctattaaatgaagttgcaacttctaaaatcacaggtgaagaagaaatttattcacatacagatttatatgattttaaagcgaacgttgaaggcgcacaaaaaatttatgacttatttaaacctattttagagaaaaaagataaaaaattaagtgatgatattcaaatgaacttcgataaagtgaatcaattattggataaatataaagataacaacggcggttatgagtcatttgaaaaagtatcgaagaaagaccgtaaagcatttgcggatgctgttaatgcattaggagagccactaagtaaaatggctgtgattactgaatgacaaattatgaacaagttaacgatagtacgcaattttcaagacgtacatttttgaaaatgttaggtattggcggtgccggtgttgcaattggcgcaagtggtgttggtagcatgtggtctttcaaatcaatgttcaatacaccagaagatccggaaaaagatgcgtatgaattttatggtaaagtgcaaccaggcattaccacacccacgcaaaaaacatgcaatttcgttgcgttagatttgaagtcaaaagatagagatgcaattaaggcaatgtttaaaaagtggacggttatggctgatcgtatgatggatggtgatacagttggcaagacgagtaacaatcctttaatgccaccagtagataccggtgaatcgataggattaggtgcaagcaagttaacgattacctttgggattagtaagtctttgatgaagaaaattgggttatctagtaaaattcccgatgcctttaaagatttaccgcattttccgaatgatcagttaatagacgattacagcgatggtgatattatgattcaagcatgctcaaatgattcgcaagtatcctttcatgcggttcataatttagttcgtccatttcgagatattgttaaggtacgttgggcgcaatctggttttatctctgctaaaggtaaggaaacacctagaaatttaatggcatttaaagatggaacaattaatcctagaaagagtaatcaacttaaagattatgtgtttattgatgacggatgggcgaaacatggaacttattgtgttgtcagacgtattcaaatacacattgaaacgtgggatcgtactgcactggaagaacaagaggctacatttggtcggaaacgacatagtggtgcgccgttaacaggtgggaaagagtttgatgaaattgacttaaaagcgaaagatagtcatggcgagtatattattgataaagatgcccatacgagactagcgaaagaagcaaatacgtcaattttacgtagagcctttaattatgttgatggtacggatgaccgcacaggtaacttcgaaacaggcttgttgttcattgcttttcaaaaagcgacaaaacaatttatcgatatacaaaataatttaggtagtaatgataaattaaatgaatatattacacatagaggttctgcttcatttttagtattaccaggtgttagtaagggaggataccttggtgaaacattatttgactaaatttgtagcaatgctaataactgctgctatggtgtgtagctttgggttactgaaaagtcaggcagcagaacaacaaagtattagtgatgtatatagtgtgataacggatgcgaaatctgcactttctaataattcgatatcgaatgacaataagcagaaagcaattgagcaagtggtaagtgcagttaagaaattatcgcttgaagataatagtgaaggtaatgctgtcaaatcagatgtgagaaagcttgaagatgcaaaagcgaatgataatcaaaaagatacactttcgcaattaacgaagtcattaattgcttatgaagagaaattggctagtaaagatgcgggttctaaaattaaactattgcaacagcaagtcgatgccaaagatgctgcgatgacaaaagcgattaaagataaaaataaagcggaattagaatctttgaacaatagtttgaatcagatttggacaagtaatgaaacagtgattcgcaattatgacgcaaatcaatatggacaaattgaagtcgcattattacaacttagaattgcaattcataagtcaccattagatacggcaaaagtgtcacatgcttggacaacttttaaatcaaatattgatcatgtcgataaaaaaagtgatacgtctgcaaatgatcaataccatgtatcacaattaaatgatgcgttagagaaggcgattaaagctatcgacgacaatcaattgtcgaatgctgatgctgcgcttacacattttatagaaatttggccgtatgttgaaggtcaaattcaaactaaagacggggctttgtatacgaaaattgaagataaaataccatattatcaaagtgtattagacgaacataataaatcgcatgtcaaagatggtttagtagatataaacaatcaaattaaagaggttgttggccatagttatagctttgtcgatgtgatgattatctttttacgtgaaggactagaagtgttattaattgtaatgacattgactaccatgacgcgtaaagtcaaagataataaggggactgcaagtgtgattggtggtgcaattgccggacttgtactgagtattatcttagcaattacgtttgtagaaactttagggaatagtggcattcttcgtgaaagtatggaagcgggattaggtatcgttgcggtcatattaatgtttatcgttggtgtttggatgcacaaacgttcaaatgcgaaacgctggaatgatatgattaaaaatatgtatgccaatgcgattagtaatggtaatttggtattgttagcgacgattggtttaatatctgtgttgcgtgaaggtgttgaggttatcattttctatatggggatgataggtgagctagcgacaaaagattttattattggtattgccttggccatagtgatattaattgtctttgcggtattatttagatttatcgtcagattgatacctatattctatatatttagagtattgtcgatctttatttttattatgggattcaaaatgcttggcgtaagtattcaaaagttacaattattaggtgcgatgccaagacatgttattgaaggattcccaacgattaactggttgggcttctatccaagttatgaaccattgatagcacaagctgcttatattatggtagttgctatcttaatctttaaatttaaaaaataaaaaacaggccgagtgcctgtttttttgttgctgtattgcggattatcgtagcattgttgagatgtggatatcgctgcatggttggttctcgttgtattgcagatatcacggtttaatccgattctgtattctaattaacgcaagtgcagtattgatataatctgaggtgctacattgttcttttattggctattgtgatgttgctgcattgtgagtatcacagcattaattcgtataaggttaatgtgttggcggtttgcctcggcatgtgaacttaacaatgaacatactgaactcaaagagcaatatgagtggcaatgtaagtaatatatttaatgttaaatcgggtggtgcaatgatacttgccagcacaaagcaagcgaaataaatatattttcgataatgcttcaatgatgtgatatctataagaccgaattttgcaagtcctatgaataatattggcaattggaataaaatgccaaaagtgaaaagccaacggataagttcaactaaatacgctttaaagccaatgacaggcgaaatgtttaaagttaatgataattttaacgcgaattgaatgattattggaaagccaacataaaatgcaaaagcgacgccagcacagaataataacacgctgaaaaaactatatttataaataaattgacgttcattattatgtaatccaggtgcaatgaatgcccacaattgataaaacatgactggtgaaatgaaacaaaacgcgatgaaaaatataatcatcacgtatatttggatcatttctgtgaatgaaaatgcatgtaaggacacatgtgcacgggtaatatacgttatgaatggtgtcatccaccaaaatgatgaaacatatacgacgatgactgtgacgacgaacgacaatagtattttaactaaacgatgacgtagctcgctaaaatgaactagtaaggtgtggtcagtgctattgctctcgctgttgtttcgattccttactgggtgtgtcgtgagactctttgtctaaatcttctgttgcagatttaaattcttttaaagtagaaccgatagcacgaccaaattgtggtaattttttcggaccaaaaataattaaagcgataatgctaatgacgacaagacttgttgggcctgtgatgcctaaaataaaagtgttagttatcatgataatcaacctcactcataagtagtatatagtatttactttataccgaacgataatgattatcaataaattttataaaataattaaaatgttgctgtaaatacaaattactgaggtattaattctgaaataatagcttgttctttcaagtcgatataagtacaagtaccagcttgaatatcgatatgccatttataaatgccagcttcagccatttcatcacaaaatgtttcgaaatctgtttgtccttgttgatgtctagttaatacatcttgaactattgttttgtttgatttttgagcaacaggatgattacttttcacagatgacgtaacgatatcatcttctgattgatgtacgtatgttgcagtgccatcttgaatgttgacgatattgtaagtcatccccatatctttaaaagctttgaatagttttggaaagtcaacaccagtaaattgttgatgtgcttgttgaattgcagataatgtaaatgccataatagtctcctttgaatggtttgatttagtgaaaatgcgtgcatcatactaaaattagaatgctgttaattatgcaggaaggtgtaacgaaagtaaacaattatgacttgtaggcgttgaggtgttgtttcaaaatgtcatacataggtggacaatcatatttttttgtgtagatttgacaaatatagttgtcaaaaagacaaatatcatttacattaggactaaggagttgatgcgatgtgcgtaatcgattgaaagagttacgagcacgagatggcttaaatcaaacgcagcttgccaaactagctggtgtttcaagacaaaccatttcgctaattgagcgaaacaattttatgccatcagtattaacggcaataaagattgctcgcattttcaatgaaacggtggaaacggtttttattattgaggaggatgaagcatgaaaatactaagatatatcggatatcttttactgggtggaattgtagggggtatcattggtggaattttaggtaactttgatggattgggtattgagaacttgacgtttgcgacttataacaatgtcgttgtaatatcgattgttgcgactatgatcatcatattggtagaagccattgttttgatgaatcaaagacgtgcattgaagtataagcgacttgtagatgaagaggtagatatcgatgcaacagatcaatatgaattgcttgcgaatcgttatgttttaaatggaagtatattaagcgttatacagacaattattgcctttgtagtgttactaatttttgtggtagggcaagctgaagcaaatgcaatgctattctttttaataccattttttgctagtgctattttcaatacacaatttacactgtttaatagaaaatttgatgacagaatgccaaaaattgcagataagaattacactgaaaagcgattggaaatattggatgaaggtgaacgccatatagaattaattgcattatttaaaacatatgcgatcaacttatcaatattgatactagccattatttttatagggtcttattcaattgctacaggaattaatcaaagctttagtttgctacttatcattgctattttcatatataacgcctttagctatttattgaagagaagacgtttttattaaaattaaacaaagaggagcatggatatgacaacattgttaaacgtagatcgtgtgaacaaacaatacaaagattcggattttaaattgcaagatgcatctttaacgatttctactaatgagacagttggattaattgggaaaaatggctcaggtaaatcgacattaattaatattctagtaggcaatcgacataaagataacggtagtattgcattttttggagaagaacatgctgcggatgatgtcgaatataaagaacacataggtgttgtgtttgatgatctgagagtacctaataaattgactattaaagatattgataaagtatttcaatctatttatacgacttggaatagtcaaaaattctttgatttaatcaaatatttcgagttaccactacaaactaaaattaaaactttttcaagagggatgcgaatgaagatagctttaacgattgcgctttctcatgatgtgaagttattaatcttagatgaagcaactgcaggtatggatgtttctggaagagaagaagtaatggaactattagaagattttgtcgctcaaggtggaggcatcttaatatcatcgcatatttctgaagatatagaacaattagcggataaattagtgtttatgaaagatggacgaatgattttaactgaacagaaagatatacttttagcacaatatggaattgttacgacaggagataaagatgttgaaattcctaagcatttaatcattgcttctagattgtcaaaggggaaatatcaaattttagttaaagattatgcagaaattgaaaatgcagagcctttaaaacacattgatgacgctacgaaaatcataatgcgaggtgaagtataatgaaaggtatgttcctaagtagtttttatgcaacgagaaagcaaacatatatttattttatagtcgctatcatagctgcgggatactttgcagtatttaatccgttgatgagttcggcaatggctggggttatgttaatcacacccattactgataatattaaacatgaaaaagactcaagatggatgtattatgtatctactttaccggttaaacgtagtgattatattaagtcatactttgccttttatttaatcttattcggtgcaagtttaatgattggattagttgtgactacgatcgtgacccaaagtgtgatgattggtattatgtcaggtttaatgagttttggtatcataggggcatactctatcattttcccattgacatttaaatttggcgctgaaaactctaatgtcattatgatagttgcatctatcctactacttttttctttcgtggtctttttctttatatatggtatggttagtggtgcatcggcattagaatttgaaaaaattagcactgaaggatggttagttgtcatagtatatgcggtcattggtatcgttataacaagtgtttcttatatattgtctattaaaatttttaacaaacaagaactataatcaatattcttggtgtgaagctagtcattgaaataatatttagagcaggtgataaatcaatacgattatcatctgctctttttggtgttgtggaatgaaatgcgggatgataggttgaggtgacatctctatatcatatcatttgtttttagaagattaggttatgtgggaattgcatccttttatagtgaggattaacgtgtatatatcattgagtatgttgctgaaatttatttgcgtgtatcatttgatgattgtataggctaacgatttccttggaaatatttaaaaacctcgatcatgtagcataactgaatccaaaagtataatgtgaagttcgacacttttggattcagttcaaatactttgaccgaggtgaatactatttattcatgtttattacgtagacgttgatttttaaaataaatcagcatgatgcagaaagtcgcaacggataccgagataatcattacttggtcatgccccttaaagataaggctgatgatatatgatactacaagtatgcctagtgaagaagaaatatattttgcgtttgtcagttcattatggaaataaggcgtgattaaccataatccaatatagaatattaaaacactgatatacatcatattaatttcaaacaagtcatttagtttattgttattactaaaaacaattgcagcattaatcacacctaaagcgatattgattaatagatgcgtatacgataaacggaaaccgatagatgacaatttatgattaatgtaattttcagtaatgatccaatatacaccgaaaagactaattaaaatcataaattggaatatataaatgtaactaaaatgatcaatgctaaatgatgacgaagctaaaccaaccagtacctcgccaaagataataattgttagtaacgaaaaacgttctactaaatgcatcatattaacaggtgataatacaagatatttctgaaatggaataagtcctgtcgctgcaatgaatacgcctaaaaatccagggatgtaatggatactttgtggtagtactaatgatagaaatgataaaaatgaaatcacaaaggctacgctcgcaaaagcttgacatgtacgcttatcgccataatctaaccctgtacgtatatgtaataaatactgtaatccgatacttaaatacataattgccacgcataagaagaatgggaagaatgtcttttcaaagtccggatataggctgttagataggaagaccatgatgaacatattaaacatcataaacgagacgtctttgaatgtaacttgaccaaatcgatttgtaaaaaatgtttgatgagaccacattaaccataagaacaaactcatgacgatgtatttgaaaaataaatcagctgaaatggaaccgttttgtgttgttaaaatcacatgtgcaattttttgaatggcatagacgaaaattaaatcaaagaacaactcatggaatcctgcacgcttttcagctaaatgttttggtgttaatgcattaaccataaaattttaactcctttaagatgtgtaattaatttactaagtatactatttattttttctagtgaataggggcagatttggcgatgaagtggaaggagaggtgactgcaaggtaattgcggaattaacaatcatcagcgatttaatatttgactggagacgtcatggtaataaaaaattgatgagaaattgatggtgaaaccagctgtgaatagcgatgcaatgatagatagaatttaattagagtcattacgcgaaatgattaatgataatttgtggtaaatcaaagcataattttgtactatagatgaggatgatagagcatatttaagagtgtgaaatgttaaagtgaaaccgtttacgtttccgattgcccaaacaaattacatcattgtataatatgatttgttaaatgcataacaagaatgaaaatgtaacatacgtagcaattggtttcataaattggatgttagtggcgtattggttcattagacgtattagtaataaaattgtatatatcataaggagatgaatatgacatgacgagagtcgtattagcagcagcatacaggacacctattggcgtttttggaggtgcgtttaaagacgtgccagcctatgatttaggtgcgactttaatagaacatattattaaagagacgggtttgaatccaagtgagattgatgaagttatcatcggtaacgtactacaagcaggacaaggacaaaatccagcacgaattgctgctatgaaaggtggcttgccagaaacagtacctgcatttacagtgaataaagtatgtggttctgggttaaagtcgattcaattagcatatcaatctattgtgactggtgaaaatgacatcgtgctagctggcggtatggagaatatgtctcagtcaccaatgcttgtcaacaacagtcgcttcggttttaaaatgggacatcaatcaatggttgatagcatggtatatgatggtttaacagatgtatttaatcaatatcatatgggtattactgctgaaaatttagtagagcaatatggtatttcaagagaagaacaagatacatttgctgtaaactcacaacataaagcagtacgtgcacagcaaaatggtgaatttgatagtgaaatagttccagtatcgattcctcaacgtaaaggtgaaccaatcttagtcactaaggatgaaggtgtacgtgaaaatgtatcagtcgaaaaattaagtcgcttaagaccagctttcaaaaaagacgggacagttacagcaggtaatgcatcaggaatcaatgatggtgctgcgatgatgttagtcatgtcagaagacaaagctaaagaattaaatatcgaaccattggcagtgcttgatggctttggaagtcatggcgtagatccttctattatgggtattgcaccagttggcgctgtagaaaaggctttgaaacgtagtaaaaaagaattaagcgatattgatgtatttgaattaaatgaagcatttgcagcacaattattagctgttgatcgtgaattaaaattacctcctgaaaaggtgaatgttaaaggtggcgctattgcattaggacaccctattggtgcatctggtgctagagttttagtgacattattgcatcaactgaatgatgaagttgaaactggtttaacatcattgtgtattggtggcggtcaagctatcgctgcagttgtatcaaagtataaataataagaaaacaggttatcacaacagtattaattacatgttggcataacctgtttttatttgtttatggatttattgggtaatattagtcatttgatggtttaattgcaaatgctctaacagggaacccaggtgcatcttttggtttagggctgatagcgtaaatgatggcgccacgagttggtaattgatctaaattagttaataactcgacttggtatttatcctgaccaagaatataacgttcgccaactaaatcaccattttttacaacgtccacagatgcatcggtatcgaatgtttcatgaccaacagcttcaacacggcgttcttcaattaagtacttcaaagcatctaatccccaacccggtgcatgttgttgtccgttcgcatctttgttttcaaacttttcaatattaggccaacgttttgaccaatcggtacgaagtgcaacaaaagtgccaggttcaatagtaccatgctctttttcccatgcttctatatgcgcacgtgttacgatgaaatcattgttgttcgctacttctgttgaaaagtctaatacaattaacggcaataccaattcttttaaatcaatgtcttctaaataacgtttgttctcgacaaagtggattggtgcatcaatgtgagtaccatattgcgttacaatattccaacgttgcacatagaaaccatgatctttaaccgtgaataaagttgaaacttcacctttttcaaactcactaaaacgtggtatttctggatcaaatgtatgcgttaaatcaacccaagttgcttgttttaaagtatttaattgttgccataaaggatattgtgtcataaaatcgcccgtttttagtttattatatgataaatgctgcgattattcttggcgtttagctttaacagcattcacaagtacagtcaatgcatctttaacttcttcttcttttcgcgttttcaaaccacagtcagggtttacccagaataatgagcggtcgatttgttgtagtgaacgattgattgctgtagtaatttcttcttttgttggaatacgtggactatgaatatcatatacacctagaccgatacctaaatcataattaatatcttcaaagtctttaattaaatcaccatggctacgagatgtttcaattgaaataacatcagcatctaagtcatgaatagcatgaatgatttgaccgaattgagaataacacatatgtgtatggatttgagtttcatcacgaactgaagacgttgcaagtttaaatgataaaacagcatctttaagatattgttcgtgatattcagagcgtaatggtaagccttcacgtaatgcaggttcgtcaacttggataactttgattcctgcagcttcaagtgctaatacttcttcgttgattgctaaagcaatttgatcttgaacgactttacgtggtaaatcaacacgttcaaatgaccagtttagaattgttacaggtccagttaacatacctttaactggtttatctgttaagctttgtgcataaactgtttcatcaacagttaaaggcgctgtccattttacatcaccataaatgattggtggttttacggcgcgtgaaccatatgattgcacccaaccgaatttagttactaagaaaccttgtaatttttctccgaagaattcaaccatgtcattacgttcaaattcaccgtgaactaatacatctaagccgatgtcttcttgaattttaatccatcgagcaatttcattttttaagaatgtttcatatgcttcgtctgtaatgcgtttgttcttccaatctgcacggtattttcgaacttctcggctttgtgggaatgatccaatagttgttgttggtaaatccggtaagttcaaacgtttttgttgttgttcaatacgttgcgcgaatggtgattgtcttgaagtacgcacgctttcgaaatcataatctaagtttttgaatgattgattttggaaacgctcataacgtgcttttaatttatcatatttaacactatcgttttgattcaataggcgacgcaatgcatctaattcgtctaatttttcagttgcaaagcttaagccttcgccaacacttgtatctaatgtttcatcatctaaagatactggaacatgtaataatgaagatgatggttgaatgacaagctcattagtgtgtgctaacaatttgtcgattaagacttttttagcttcaatatcacttgcccatacattacgaccatcaataattccagcgtataatgtttttgatttatcaaaatctcctgcttcaatttgtttaaggttatagccattatcatggacaaagtctaaacctaaaccaccaacaggtaaagaacttaagaatttaagatgtgcacgttcaaagtatgtttgaatgactaattttttagcaacaccagctttttcgaaatagtcataagcttcacgtgtaatattttcatagctttcgctgtcgtctgtaactaagattggctcatcaacttgaatgtactcagcacctgcatcaattaatgattcaaacacttctttataaagtggtaataacgttttaactttttcttcaaaagtttggtgaccgccttttgataatttaacaaaagtaatcggaccaacaatgacagggtgagcgttaacgtttaaagattgggcatatttaaagcgatctaataatacattgcgactcactttaggctcaacattgtcccattcaggtacgatgtaatgatagttagtgttaaaccattttataagtgcacttgcaacatggtctttattaccgcgagcaatatcaaataataaatcatcatcaatagttcttccttggaaacgttcagggatgatgttgaataataatgacgtatctaatatatggtcatataaagagaaatcaccaactgggatgctatctaagtgatagtacttttgtaataataaattttctttatgtagatcagttaatgtttgatctaattcttctttagaaatcttctttgcccaataactttcgatggcttttttccattctcttgttctacctaatcttgggaatcctaagtttgatgttttaattgttgtcataatattgcctccttgtgagcagtaatagattttgagtatgctgcaagttctaatgaatcttcgacattttgaaacggtgtgataatgtataaaccattaaaatattcatgaacagtatcgattaaatcctttgaaagcttaagacttagttctcgtgttttggctttatcatctttaactgcttcaaattgttgtaaaatttcatctgacatcttgattcctggcacttcattatgcaaaaagagtgcgtttttgtaacttgcgataggcataatgcctatgaaaaatggtttgttcaagtgcttagtggcatggtaaatttcaatgattttctctttgctgtacacgggttgtgttataaaataagacattccgctttctatctttttctctaatcttttgacggcaccatctaatttacgaacattagggttaaaggcgccagcgatgttgaagtgtgtacgtttcttcagcgcatcaccgtcagtgttaataccttgattaaatcttagagcgagttcagttaatcctttagaattaacatcatagacattggttgcacctggtaagtgaccaacttttgaaggatcaccagttatggctaatatttcgttaacgccaatgagcgataatccaagtaaatgggactgcaagccgattaagtttcggtctcgacatgtaatatgtacgagtggttcaatattgtaatattgcttaattaagctagcagcagcaatattgctaattctgacagttgccaatgaattatctgcgagtgttaccgcatctacattagctttatcaagtttagcgatattttcaaaaaatctatccgtgtctaaatgtttcggtgtatccaattcgataataacggttggacgttcttgaaccttagatgttaatgattgtctaactttattttgagatggattgaaaagtgctttcgttggtatcggaatcacttttttgtcattaacaggtttaagtgtctgaatagattctttaataaatttgatgtgctctggcgttgtaccacagcaaccaccaattaaacgaacaccttcgcgaattagattttgagcaacttgaccgaaatattgtgcattgtcactatacttaaattcactattttcaatatctaataagctggcatttggataacaagataagaatgcgtgctctggtaattcaatatgtgtgaaagactcttgcatatggtgcggaccatgatgacaattgagtcccacgatgtttgcaccacattgaacgagttgttttaatccttcattgattgcctgaccattaactaagtaatttgtgtttgaagcggttaattgagcaatgattggaatgtcgtatttctttctcgttcgtgaaatgacatttgttaactcttctaggtcgtaatacgtttcgaaaagtagcgcgtcaacgccttcttcaattaaggtgtctatttgaatttcagtatgataaagaatagtttgtaagctgatatcctcttgtttgatacctctaaacccaccaactgtgcctaatatatacgtatctttatttgctgctttttttgcgatgcgaacggcggcttgatgtattgctttaactttatcttcaagaccgaatcgttttaacttttcaaaatttgcaccataagtattggtttgaatgacatcagcaccggcttcaatatatgaacgatggatgcgttcaactttatctggatggctaagattatatgcttctggacaggtgtctaatccttcagagtataaaatggttccaatagcgccatcagctactaaaacattatctttcaattgtgtgaggaattgactcattgaatgcctcctttaatgcgtatttgatgtctgcaatgagttcatcaggatcttcgagaccaacacttaatcggaatagaccgaaagtgataccacgttcttgtctcacttcttcaggtagtgcagcgtgagacattgttgctggatgtgaaaggatcgtttcaacaccacccagactcactgaaacgagtggtaatgtcagtgcatcgacaaattgttgtgctttagactcatcagctaaacgaaagccaataacggcaccgccatttttagcttgttctaaatgagcagtagtgagtcccggataataaacttctgaaatttcatcttgctttattaaaaatgacacgattttttgcgcgttttcgacagattgtttaaatctgattggaaatgtttttaaatgtttagcaagtgtccagctatcttgagcagataacatattgcctgtaccattttgtattaaataaagagcttcactaattgcctcattattagtaatgacagcaccagcaattaaatcgctatgtccacttaaaaattttgtagcactatgaatgacaatatcagcgccaagtaataaaggtgattggcctaacggtgtcataaatgtattgtccacagctaccagtagttcatgcttttcggctattttagaaacagctttgatatcagtaattttaaaacagggattcgatggtgtttcgatataaattaattttgtgtttgattgaatggcaccctcgatttgttcgagcttggtagtatctacggttgtaaattcaatattaaatcgattcaaaatttgctcagtgaggcgaaaagtaccgccatatacatcatcgggtaagatgacatgatcaccagatttgaaagtcaaaagtactgctgaaatagcagcaatacctgatgcaaaagcaaaagcgaattttccctgttctaatcgtgctaacttctcttctaaaagttcacggttagggttgccacttcgtgcataatcatatttaacatcgccaccaagacttgtttgatggaatgttgaagaatcatagagtggtgggttagctgaatgatattccacacctctacgccaatcgaatatcacttctgtctcttttgaaagtgtcatacaatctctccaatctgagctttatctaatgcttggatgatatcgcgttcgatgtcttcataattttcaacacctagtgataagcggattaaatactcatcaatgccacgtttatctttttcagcatctggcatatcaacatgtgtttgggtgtaagggaaggtcactaatgtttcagtacctcctaaactttctgcaaaaatacaaatgtctaaattttctaataatttagcgacgctataggccttgttaagtcttaaactaagcatgccagtttgcccgctatatagtacttcgtcaattgcttgaagtgactgacattttttagcaagttttctagcgtttgattgcgcacgctcaatgcgtaaatgcaaagttttaagtccacgtaacaacaaataactatctattggtgaaagtgttgcgccagtcatgttgtgaaaatcaaacaactgttgcgcgagtgattcatctttgacggttacgacacctgctagtacatcgttatgtccaccaatatatttcgtagctgaatgtaagactatatcagcaccttctgctaatggtgttgaaagataaggtgttaaaaaagtattgtcgataattgacaataagcctttagctttacaaagttgatagtacggctttacatcaatagcaatcatttgtgggttagatattggttcaatgaataatgcaactgttttatcagtgatttctttttcaacttgttcataatctgtaaaatcaacgtacttaaatttgatatcgtattgttgctcgtaaaattcaaataatctaaatgtgccaccatataaatcgaatgaaactaaaatttcatcatgaggtttaaatagattacatattaattgaatggctgacattccacttgatgtagcgaatgatgcaataccatgctcaagtttggcaaaacaggtttcaaatgttgagcgtgtaggatttttagtacgtgtataatcaaatcctgtcgattgtcctagttttggatgtttgtaggcagtagataaatggattggattcgctatagcaccggttgaatcatcagttaatgtgatttgggctaactgtgtatccttcatattaagaccctcctataagaaaaaataaaaagcttccgtccttcgtacccgaatgaatcggataaaaaggacgaaagcttatgtttcgcggtaccacctttatttgttattccatcgctgaaataaccttattcagtacgcattaaaagtaaatatgcttactgaacaattatcacaattaaagtcagtaagtaaggatatagtaatgtgctatcccatacttattaacaaaaaatcgtgcgtaaagaatccagtacgccatttaacatcaatgttaatactgtatcgctataacgggcgaacccgtagacacctcatattggcatcaacactccaaggccattttcaaacacgctttcaaaatcttctctcagctactaaagactctctgtataagcagggtgtgttttactttcctctttattgtgtttacgtttcattaaactattataagatattaattagcttacagagtaaaaaaagatttgtcaacaattattcagaaaattttgatttaaaagttaatttgtttgtgaaattgtaattggtatcttgaagttgaaaaatgaattattttttaaataaagtgtggttaatggttgtctgactcatttagaatacataaaatatatttaactgttgttatcaaataaaaagtgatgtgagtgaattgtcaaaaagtgaagatcaacgtattactaaaacaaaagatgaacaaattaagcaaatagatatatcggatatcaaaccgaatccgtatcagccccgaaaaactttcgatgaaaatcatttaaatgatttggcagattcaattaagcaatatggaattttgcaaccaattgtgcttagaaaaacagttcaaggttattacattgtagttggtgaaagaaggtttagagcttcgaaaattgctggtctaaaatacgtatcagcgattatcaaagatttaacagatgaagatatgatggaactggcggtcatcgaaaatttacaacgagaagacttaaatgcgattgaagaagctgaaagttatcaacgtttgatgacagatttgaaaattacacaacaagaagtagcgaagcgattgagtaagtcgcgcccgtatatagcgaatatgttgaggttattacatttgccgaaaaagattgctgacatggtaaaagatgggcgactgacaagtgcacatggacgaacgttattggcaattaaagatgaacaacaaatgcttaggttagcgaaacgggttgttaaagaaaagtggagtgttagatatttagaaaaccatgttaatgaattaaaaaatgtttcgtcaaagtcggaaacagacaaagtagatataactaagcctaaatttataaagcaacaagaacgacagttgcgagaacagtatggtaccaaagtagatatatcaataaaaaaatcggttggtaaaatctcatttgagtttgattcacaagatgactttgtgagaataattgaacaattaaatcgtaggtatggtaaatagttacacaattttatataataactctttgtgaatctatagatatattgatagttatctatattctttgaagatgatgcgacttcagtaggttggaagaatacaacaatattaataaaattatttgagactatatagaagggagtaacgctaattatggatcaagttatgagtattatttcatcgctattcgaaccattaactaaaattgaaacatatgaaaatattgcaactaaaatcgctatgattgttatttatattatcgtagccctcatagttattaaaatactgaataaaatgattgaacagggatttaagattcaaaataaaagtaaaaagagtaacaaaaagcgctctaaaactttaatatctcttgttcaaaatgtagtgaagtatatcgtttggtttatagttattacgacgattttaagtaaatttggcattagtgttgaaggtgttattgcaagtgctggtgtcgtaggtttagcagtaggttttggtgcgcagaccattgttaaagacgttattactggatttttcattatatttgaaagccaatttgatgtaggtgattatgttaagataaacaacggtggtacaactgtagcagagggaacagttaaatcaattggactccgttcaacacgtattaatacaatatctggagaacttacaatcttgccaaatagtagcatgggtgaaataacgaattactcaattacgaatggaacagcaattgttaaaattccagtatctgtagatgaaaatattgataatgttgagaagaaattaaacaaattatttacatctctgcgtagtaaatattatttatttgtaagtgatcctgttgtgattggtattgatgcctttgaagatactagagtaatattaagggtttcagcagaaacaataccaggtgaaggtttctctggtgcgcgtattattcgtaaagaagtacaaaaaatgtttttacaagaaggtatcaagacaccacaaccaataatgacaccttttaatcatagtgaaaacggtgtttagtagtttataatacatggaggtcatatttaatggcgtcaaaatatggaataaatgatatagtagaaatgaaaaaacaacatgcgtgtggaaccaatcgttttaaaattattagaatgggtgctgacattagaattaagtgtgaaaattgtcaacgaagcattatgattccacgtcaaacgtttgataaaaaactaaaaaaaatcatcgtatctcaggatgatacacaaagataggagaatgattcatggctttaacagcaggtatcgttggcttaccaaacgttggtaaatcaacattatttaatgcaattacaaaggcgggtgccttggcagcaaactatccgttcgcaactatagacccaaatgtgggtattgtagaagtgccagatgcaagactacttaaattagaagaaatggttcaacctaaaaaaacattacctactacatttgaatttacagatattgccggaattgttaaaggtgcttctaaaggtgaaggtttaggtaataaattcttatcacatattagagaagtagatgcaatttgtcaggttgttcgtgcttttgacgatgataatgtaacacatgtagctggtcgagttgatccaattgatgacatcgaagttatcaatatggaattagtacttgcagacttagaatcagttgaaaaacgcttacctagaattgaaaaattggcacgtcaaaaagataagactgctgaaatggaagtgcgtattttaacaactattaaagaagctttagaaaatggtaaacccgctcgtagtattgactttaatgaagaagaccaaaaatgggtgaatcaagcgcaattactgacttctaaaaaaatgctttatatcgctaatgttggtgaagatgaaattggtgatgatgataatgataaagtaaaagcgattcgtgaatatgcagcgcaagaagactctgaagtgattgttattagtgcaaaaattgaagaagaaattgctacattagatgatgaagataaagaaatgttcttagaagatttaggtatcgaagaaccaggattagatcgattaattagaacaacttatgaattattaggattatcaacatattttactgctggtgtgcaagaagtacgtgcttggacatttaaacaaggtatgactgcacctcaatgtgctggtatcattcatactgattttgaacgtggatttatccgtgccgaagtaacaagttatgatgactatgtacaatatggcggcgaaagtggcgctaaagaagcgggcagacaacgattagaaggtaaagaatatattatgcaagatggcgatatcgttcatttcagatttaatgtataaacgatagagtgaagttaattaaatagtatatatgtagaagaggcggaatcaattgttcgcctcttttaattatgcgtataatttattaaaagaatggaatgattttactcgcgtaaataatatcttgagtgctgaaaaattgtttgccttcgccagtataagcaggctctaaaacaagattagcctttgcacaataaagccattcaggatgaatgccactattaagtatctcttggaattcttgaaaatctttagaccaatcaatatttaaattcattccttaccacctcacaaccattatagaacatgcgttcgcttttgtgaagtgtatttttaaaaatatcatagaaaatttcaaatgaattaatgtcaaaaatgatatgaagagtagtttgaattattattgtaaaaagtaatggcgcatgatataattctttattgtgagtaatgaaaattattccttgcttatctgttttaagattgataagccgtatagaccacaaggaggtgcaaatataaaatgagaacatatgaagttatgtacatcgtacgcccaaacattgaggaagatgctaaaaaagcgttagttgaacgtttcaacggtatcttagctactgaaggtgcagaagttttagaagcaaaagactggggtaaacgtcgcctagcttatgaaatcaatgatttcaaagatggcttctacaacatcgtacgtgttaaatctgataacaacaaagctactgacgaattccaacgtctagctaaaatcagtgacgatatcattcgttacatggttattcgtgaagacgaagacaagtaataattagagggggcgtttaaatgctaaatagagttgtattagtaggtcgtttaacgaaagatccggaatacagaaccactccctcaggtgtgagtgtagcgacattcactcttgcagtaaatcgtacgttcacgaatgctcaaggggagcgcgaagcagattttattaactgtgttgtttttagaagacaagcagataatgtaaataactatttatctaaaggtagtttagctggtgtagatggtcgcttacaatcccgtaattatgaaaatcaagaaggtcgtcgtgtgtttgttactgaagttgtgtgtgatagcgttcaattccttgaacctaaaaatgcgcaacaaaatggtggccaacgtcaacaaaatgaattccaagattacggtcaaggattcggtggtcaacaatcaggacaaaacaattcgtacaataattcatcaaacacgaaacaatctgataatccatttgcaaatgcaaacggaccgattgatataagtgatgatgacttaccattctaataaaaattaacgaaattaaagcgaaaaaattatcaaaggaggcacacaatcatggcaggtggaccaagaagaggcggacgtcgtcgtaaaaaagtatgctatttcacagcaaatggtattacacatatcgactacaaagacactgaattattaaaacgttttatctcagaacgcggtaaaattttaccacgtcgtgtaactggtacttcagctaaatatcaacgtatgttgactacagctatcaaacgttctcgtcatatggcattattaccatatgttaaagaagaacaataatatttaatatattataaccctcgtaggcataggcttatgggggatttttttatgtttgggatatagaaaagggacagaaaagggcaaaaaaggatgatgtgaatgttttgtgttcggaatttgcacaaagatatgtttatattgcaaaaataatatgaatttagatgcataaaaaaagaactacgcattttaaataaaatgcatagctcttctttttcttgcatacgaattaaaataactcgcgagacctataagtctctttcctcactagatagtttatacttttggtctgttgaagtcaataattttatctaaagctataaaaaatcttttgatagctaatgcattattataatagctttcgtttcttttatatcgcttttgaagttggtccaaatcgtgatatcttgcttggataattgcattactacaaacttgattatgtaattctagcgtagcgaaagtatctatgaaattttttattccgaacatgtttctagatatgcctatattattccctttttcaaataaatattgaggagatctactgtcataatttagatttgctatgatgggttggttatgagctgatttgtttcttatatttttaactaaaggcattaaaatattagcaactctcaattcttcgtcattgtacttcttgtaatagaagttgagaaacgaaacgaattgacctagttgcatgaattcaatgcaaacccatgcgggtggattttgatagtatttattcaacttctcgggtagttgtcctcgtttattcatatgcttgaatatttcgtttttatttttgattttggtttccataacttcttctggtgttcttgaatttgtgtcaaaatttgaattgctatatgatttatcaatacataagaactcatctattattttataaccatcttcttggttattttctgttattagttttaagactagacactttaaactatgttcaatatctaaagttaaatgcaacattgtgtatcttaatttcatatctatagttgctaaatctgataaataagcaaattctatgaaatagccgccattctttttttcgaaattttttcggaaataagctagtttgaagaagtaattattttttctaagaatttcatttgctttttcggtgtcaataatattaaaaaatatattcatctgttttaatttcgctatttgctcatcaaaattgagcataggcttaatttctgctagtatatcatctttttccaattttaactccccaatcgttcaaatttattcatcatatctttcgccatctgattagtaacatgtgtgtatatctctagattttttataatctgaatgacctacatgctcttgcattgcttttaagttaattcctaattgagcaagtgtagatatatgcgaatgatgtaatgtatgcgtcgttacaggtttcttaatagaactaatctcagttgtctctttgatagtgccccctttaataatgttgctaattttgttcgagtcgatagggccaccagctgcatttgtgaatatgtaccctatattaataaacttatcattacaagcataagtgttcttagtaagtcgatgctatggatagtgaggcctatagccctatagctgttacttgttctagttgtctcttttactccggatgctcccgtcatttttcagttatccaattaactttaccgtcgatatctagcgttttatcttcatagtttatatttactctctttattgcaagtagctcaccgatacgcatgtcattagcaatttgaaactgtaccatagcttttaccattttataattacgttttgtcgttggatatttttatacttaattacatagtcgaaacaatccagtaactccttaacttcattatcttctaatgtgttactatgtttagctagtaacgcatcactatagggatatctattttatctattacacatataactttgaattgcttgctattttaaattaacaaattttattctcttagattttgtccaattatgtgtagacgatttatagttattaaattcagagtggtagcaaattaaagttaatcaagagttaagatgaatttaattcatgaacacgtctattatttttataattgtagcaaataaagctttacatcaaggaggtaattaaatatgttcaaaaaatatgactcaaaaaattcaatcgtattaaaatctattctatcgctaggtatcatctatgggggaacatttggaatatatccaaaagcagacgcgtcaacacaaaattcctcaagtgtacaagataaacaattacaaaaagttgaagaagtaccaaataattcagaaaaagctttggttaaaaaactttacgatagatacagcaaggatacaataaatggaaaatctaataaatctaggaattgggtttattcagagagacctttaaatgaaaaccaagttcgtatacatttagaaggaacatacacagttgctgatagagtatatacacctaagagaaatattactcttaataaagaagttgtcactttaaaggaattggatcatatcataagatttgctcatatttcttatggcttatatatgggagaacatttgcctaaaggtaacatcgtcataaatacaaaagatggcggtaaatatacattagagtcgcataaagagctacaaaaagatagggaaaatgtaaaaattaatacagccgatataaaaaatgtaactttcaaacttgtgaaaagtgttaatgacattgaacaagtttgaaattaagttgaattagtatatacagtgttttattgctaatactttgaaagttaggtatctaaaggtgcctagctttctttgttatgattagcactatcatatagaaaattctttaatgacgtttatgccgaaatctacaaatataatttctcttttatggttaatcaatatgtttttacattcgacaaccttaaaattaacttctttcaattccataataaagtctctataaaataacttagtttaaaaacgattcgtatctttcaggttcaaataccatcattttctcctaatacttacactttaattacaattatgtaagttgttttcagaggcatcctattttatattttgtcagaggtgatcttttgaaaacgattttaaaaacaataacatatcttgcacttactatcattggcgcttatgctgctttattcattttaaaaacaatagactctcatggtataacagatcaatttaacccattagtaaaggaagatgattcttatgttaaaacgacagaggtgtctactagaatggatgatcaactccgaagttatactcaaagtgcttttaataaagaagggaaagagacgcaattaatgtatactgctacatttgatgttaaaccgcatagatacttgaaaattacacataaaggtcatcatgtagaaacttttgaagaagttgaaaaggaagaagtaccaaagaaagcattagacaaactgagtcgataatagcatgcttatattacatggttcatttataaaaggagtacgaacgaaagtaacgcatgacgattaatttaaaaatatttgtaataattatgaataaaattaaaaacaaggggtaatacaatctatatagcatataagcttttgttatgagtttcaaaaataggaagagagagtgatattatgaaattaaaatcattagcagtgttatcaatgtcagcggtggtgcttactgcatgtggcaatgatactccaaaagatgaaacaaaatcaacagagtcaaatactaatcaagacactaatacaacaaaagatgttattgctttaaaagatgttaaaacaagcccagaagatgctgtgaaaaaagctgaagaaacatacaaaggccaaaagttgaaaggaatttcatttgaaaattctaatggtgaatgggcttataaagtgacgcaacaaaaatctggtgaagagtcagaagtacttgttgctgataaaaataaaaaagtgattaacaaaaagactgaaaaagaagatacagtgaatgaaaatgataactttaaatatagcgatgctatagattacaaaaaagccattaaagaaggacaaaaagaatttgatggtgatattaaagaatggtcacttgaaaaagatgatggcaaacttgtttacaatatcgatttgaaaaaaggtaataaaaaacaagaagttactgttgatgctaagaacggtaaagtattaaagagtgagcaagatcactaaaaagattcgttgcattaacgcttgtaaaatgtcttaattcatattaattaataaaataccctcacaatacttatgcataagtcctgtttgacgtgaaaggatatatgccaaacgtgttgtgagggtttaattgcatctatttatccatgcgaatatcgacttcttctaaatgtttctgatattctttaaccttactttctaaaaacatttcatatggtgcatcaaagaagtcagctaaatgcatggcatctttaaatttaggttcatgatgatgattctcccattcccaaatttgatgtgcttcatatttagtaccatatttctcatttaattgctgtgctaattcgtcaatttctaaattatgtttagttcgtaagttatataaaatatgcatattcattgttcattaacctcgcttcttgatttaaaattcaaagatgctctaataatatgtgtatattctagtcctataacataaaataatcaagctatgaattcggcagaaaaaataatgtaaatgtatatgatattgccagtacagagactttaaataacgatagctacattgaataaaattgatattcaattactacttttaaaaatatttggataaaaataatttgaatttgttttagaattgtaaataaggggtactacttagaataacgcaaaataaatagaaaaaggagactgaaaattatgtttggatttattggaatgttaattgtcggtggcttaattggatgggctgctggtgctattatgggtaaagatatcccaggtggtattttaggcaatattatcgcaggtattattggatcatgggtaggtggcaaactattcggacaatggggtcctgaattaggaagtatttacatcttgccagcattaattggttcaattatcttaattgcaatcgtaacgttaattttaagagctatgcgtaaataataaaaaaattcaattggaaattgaaataaagatggcattcagttgtcatcttttttatttgcgtgaaaatggtcaatatgtattataatatttgaaaatgtagataagataggataaaaaagtaataaattaatatgaggaaattttggaaataaaaaagcgagtatttgacaaataaaaaaaggatgacgttgggttgcgccatccaggagtattatgttcatgaatataaaagactgtgtagtcatttaagaactacacccatatagtaacacatcacttgattaaagacaatactatttttagagtcattaatttaaaatatgaattaattctttttttagaatagaatattaagattgatatcgaattagtagtcaaagtgttatggtagatatgaaatacataaggtaaggagtaatattatgacgatttatttagttagacatggcgaatcaaaatcgaattatgataataaacattttcgatcttatttttgtggacaattagatgtgccgttaacggatactggcacaaaaagtgcagacgatttatgtgattattttaaagagaaacagattaaacatgtatatgtttcagacttattaagaacacagcaaacgtttgaacatatttttccatatgacattgcatcaacgactacccctctattaagagaacgttcacttggcgtatttgagggtgaatataaagatgaaatcagtgcgaatccgaaatatgaaaaatatttcaatgatccaaactttaaagactttcgtcatagtttttcacaaaaagcgcctgaaggagaaagttatgaagatgtatatcaacgcgtagaacattttatgaatcatgttgtcaatgaagatacacaaaaagatgatattgtcattgttgcacatcaagttgtcattcgttgtttgatggtttattttaacaaagtttcaagggaagaagctgtggatttaaaggtagaaaattgcaaaccatatatcattgaatagaagtatagaggttctgaaaagctgtgttttatagtggccttcagaacctttttggcatttggaatttaatgggaatcattcttatcaacagacttaccaccaatagctaatgtgataattgcgcttatgaacaaaataattgaagttataaatgacgctaatgtaaaaggtgtaaattgtgtgagcgataatatcaatgataaaaagaaccaagagatagcccctagaaattgtaaaatagcagaagaaattctaaaactcatataatcatatatagctaaaacaagtgaaggtaatgcgactaataccattaaaatgatgttgagggtgaataaatatggctgttcaaaagttactgtgtttggtcctgttggatgcattgctgctaagaacaagcaaacaatcgtcgataaaattgctaaaataataaaagtaattcgaactttcatcatgaccatcctttgtttatagagtcaatataagtatgaaatatgttagggatatagtcaaatgcgtcaactaatgggtgattttggcatagatagagaatttaaggcaattaaaaaagcatcaaacagtaatatgctgcttgatgcaaaatggtaaggtattggttaaattgtattgtctcaaagattagtcacttttaaagataaagaattgtcatgaattaaagctcatgtaatgatgtgttacatgtcgcaatgatggctttcagttatttatcgataacatcactcttgatacctttagattttaagaaatctttaattttatcttgttgctttttattaacatcaccggcatattttgttggcacgtcgactacattgattttattttgcggttgatagctaagcttttcaatatcttcatcaacattggcgattgtactatttaaagctttgaagtaattcatcattaattcaacgggtttcttatattctttaggaatattgttttcagtgacaaatttcttgaaatgcaaatcgtttttaacagctaagttagataagtggctaagtgtttctgcttgtttttcagtcacttttgtttgactgtcaatttgtttatctagtttatgttgcataatatatttgttatcaagtatatcgctatttacagacaaatacttttctatagcttgcttcatctctgcatcactaatatcactatttttcttatctgagttaaagatatcttttgtttctaattttttagcgcttttaggtgcatggatgccagtacttgtgtgatgatcttcgttatcagattgatcggacgcgcaacctgtaagaattaatgcagatgctaaaaatgtacttagtagtaatctctttttcataatgtaatataactccttagtttatctttaattgaaaaaatatgtattcatgtttaatagagtaacattgaattagtttggaatgtcacgatgaccttgcaatgaccatagacgcaaatgattacgtgcatgagttgctttttctatcaataatgcgtcgttttgaacaatgttaaggatagcattatctataaataactgcataattggttgtatcaatttagatgtaggtatcgtacgtaaaagcataatgatttcgttcacatacttttccttctcaatatcattttcatattgatttgtttgcgagaggtacatactttaagcattatcgcacatctcgttgtatatattaagtttatcataacatgattttatgtcgggataaaaaaataacagcatcttaacaaatgtaagatactgtcagtgaaactgtgaaaactttagtttctgataatatagtcaaaggcatttaatgctgcatttgcaccagcgcccattgaaatgataatttgtttgttcttctgatctgtgacatcgccagcagcaaatattccaggtacgttagtattattgttacgatcaataacaatttcaccacgttcgtttaattcaacagcatcttttaaccatgatgtgtttggaagtaaaccaatttgaacaaagataccatctaagttaagtagatgttcttcgccggtgctcatgtcttcgtaacgtatacctgtaacatggtcttctccgacaacttcagtagttttggcatttgttttgatatcaacatttgataaagaacgtaaacgatcttgtaacacgttgtctgcttttaattcgctagcgaattcgaataatgtaacatgattaacgataccagcaaggtcaattgctgcttcaaccccagagttaccgccaccgataactgctacgtctttattttcgaatagaggtccgtcacagtgagggcagaatgcaacacctttattaatcaattgctcttcacctggaatgtttagcttacgccaacctgcaccagtagcaataatgactgttttactttctaagacagcaccgttttctaacgtaactttaattgcttcgtcagtcttttcgatatctgtagcacgtatacctgtcattgcatcaatgtcatattgatcaatgtgcgctgctaagttagaagaaaattcagaaccagttgtttctttaacagtaatgaagttctcaataccagcagtatcattaacttggccaccgatacgatcagcaactataccagtacgtaaacctttacgtgctgtgtaaatcgctgcactaccactagcaggaccaccaccaacgattaagacatcataaggttctttattttcaaactcagatgcatctgccgtactgcctagtttcgaaagaatatcttggattgtcatacgaccattgccaaattcttcgccgtttaaaaagacagcagggactgccatgatgttttcagattcttcacggaacactgcaccatcaatcatagaatgcgtgatgttagggttgatcacactcattaagttaagtgcttgaacgacatcaggacatttttgacacgttaaactaatgaatgtttcaaaatggaatgaaccttctaagtttttaatttggtcaataattgactgtttttctttaggtgcacgaccactaacctgtaaaattgctaaaacaagtgagttaaactcgtgacctaatggaattcctgcaaatgttacacctgtttcttcgccaggacggttgactgagaaacttggtgtacgttttaaagacttttcagaaagtgaaagtctaggtgacatatcagaaatttctgttaataattctttgagttccttagatttttcatctgaaccaaggctggcaacgaattcaacgttgccctccattagttctaataattgtttaagttgttgttttaaatcagcattaagcatggttgtaatgcctccttagattttacctactaaatctaaaccaggttgcaatgttttagcgccttcttcccatttagctgggcatacttcgccagggtttttacgaacatattgagctgctttgattttgtgagctaatgtactagcgtcacggccaattccgtcagcgttaatttcagatgcttgtacaacaccgtctgggtcgataatgaatgtaccacgttgagctaaaccagtagcttcatctaatacatcaaaattacgagtgattgtttgtgatgggtcaccaatcatagtgtaagtgattttgctaattgcatctgaatggtcatgccatgctttgtgtacgaagtgagtatcagttgatactgagaatacatttacgcctaatttttgtaattcttcatattggttttgtaagtcttctaattcagttggacaaacgaatgagaagtcagcaggatagaagcatactacgctccaagaaccttttaaatcttcttgtgtaacttctttaaattgatctttttttggatcgaaagcttgcgctgtaaatggtaagatttctttgttaattaatgacataaatatcttcctcctaagaatttaagtatgaattagaactatcaattgattgtgcttaattataataattctaatctcttagttagcattattacattttgatccagaatagtcaactggataactttgtaaagtgaacgattacttttaaaataaagaaagataatataaagtgctttgataatggattttgtagttgatgatttaaaaggttgtgtctatatttaatatcttgattttaatgtaaaaaatgtaaaaaaagaagatttgtattctcaactaagtcaaccttattgataatggtgtgagaatatttgttcgagatggatgaaggtgattagtgagaaactggaattttcaagtacgagacaatatttttaaaagttcaattattaacttataagcaaataattgctataaaaaagtttggacgtgtacaattgcaatatgaagatttttaattaactgtaaagtatcgaggagtgggtaacgtgtcagattatgtatataatcttgtgaaaaagcatcattctgttagaaaatttaagaataaacctttaagtgaagacgttgttaagaaattggtagaagctggacaaagcgcttcgacgtcaagtttcctacaagcatactcaattattggtatcgacgatgagaagattaaagaaaatttacgagaagtttctggacaaccttatgttgtagaaaatggctatttattcgtctttgttattgattattatcgtcatcatttagttgatcaacatgctgaaactgatatggaaaatgcatatggttcaacggaaggtttgctagtaggtgcaatcgatgcagcattagttgctgaaaatattgcggtaactgctgaagatatggggtatggcattgtctttttaggatcattaagaaatgatgttgaacgagttcgagaaattttagacttacctgactatgtcttcccggtatttggtatggcagtaggggaacccgcagatgatgaaaatggtgcagccaagccacgcttaccatttgaccatgtcttccatcataataagtatcatgctgataaggaaacacagtatgcacaaatggcagattacgaccagacaatcagcgagtactatgatcaacgtacaaacgggaatcgcaaagaaacatggtcgcagcaaattgagatgttcctaggaaacaaagcaagattagatatgttagaacaattgcaaaaatcaggcttaatacagcgatagcaagataccaaaataacccgccccctctagcttaaaatgataagtatagctagagggggcgggtatttcttgcaatgaattagtgtgaagttaatgcagcattatcatttgattcgaaagtatctttgtcccaatgttttgttaacttggcggtacctgtaccagctagcattgaatcgttcacgtttaatgctgttctacccatgtcaatcaatggttcaacggagatgagcacgccggctaaagcgactggcaagtttaacgttgacaacaccaatatggatgcaaatgtagccccgccaccgacgccagcaacgccgaatgaactaataatcacgacagcgattaacgttacaataaattgtaaatcaatttctacattagcgacgggtgcgaccataattgcaagcatggcagggtaaatgcctgcacaaccattttgtccaatcgacaatccaaatgtcgcagcgaaattggcaataccttctggcacgcctagacgtcttgtttgtgtttgtacattcaatggtaaggcacccgcgcttgagcgtgatgtgaatgcaaagattaatacttccaaagtctttttaacatagcgaattgggctaatacctaacaggcttaaaataattaagtgaatgatatacatcgtaattaatgcagcgtacgatgcgattaagaattttcctaaagtccaaatggcgccaaagtcacttgtcgataatgtgttggccataattgctaatacaccgtatggcgttaaacgtaagacgaacgtcacaatcgccattactagtgaatagatagcgtcaatcgcacgcttaagcaattcaccatgatcaggttgtttgcgtgctacgcgtaaataagcaaatcctataaacgaagcaaatatcacgacagcaatcgtggaagttgcacgttgtccagtgaaatctaagaatggatttttaggcaataattccaaaatttgttgtggtaacgtatgtgctgttaaatctttcgcttgtttagcaatttcgcttccacgtgcttgttcagcgttaccaagattaattgttgatgcatctaaaccaaacaccaaggcatacacaacaccaacaattgcagcaatggtgacagtgccaattaaaaagataaaaatgagactaccaattttagcaaacttttctccgatttgaattttagtgaatgcagcgacaatagaaatgaaaattaaaggcatcacaatcatttgcaacaatgcaacgtaaccttgtccgacaatgttgaaccagtcacttgttgatgtaataacattcgaatgtgttccatagacaagatgtaataacacgccaaatacaatgccgatacctaaagctgtaaacacacgtttcgcaaaagatatatgtttgcgagccatcatgtgcaatattacgatgaaaatcaccaatacaataatattaatcagtgtaagaaaagcattcatgaacgtcactcctcaaatttttgaatataattccgactagtatgctaagaataatattaattttaaaatatttcaagagggcatttgcaattaaatgtaaacatgatgaaattcgaccgttggcataagggaatttgtaaacaaatcgttttgaatttagtagagaaaggtgaaaagggttaatagtgttatgacctagtcgattaaagttgatatttgaaaatgaagcagggcattaaatgcaataaattaaataagttgtcattacagcgttaataatagaaatgattttaacaggaaaaaagtgatgaatatttggaaaagatatatatcgtgcactgtcataagagataagatatgagaaaacaaatgcatccttgaatcgagatgtggctatgacggtttgataaaaattgctaacctcatatttattgaataaaaagataataaatgatcaaccttgaaaagacgcttcgaacaaacacgttgtaaaaaattctgtcgaatcaaaattagcatcttttgagggttcgtgtgtgcaggtggtagttcaaaagctaccgtaaacaaatatttttgtttgagaaaaaaggcgtttgtagtaaatgtgaatatgagtgtgcccttgtgtgattcgtcatttactaacacagccaaacatttaaattgaatgggcttattaagatgaatctatttaggaatacacaggagccatcccatttaaaagtaacatactataaaaatttattcaaaattcaatattaatcataatgaataattaaaaaacctgaaacaaattagtttgatatgctctcttcaaagtagatattgaatggagtatatcagcttgtttcaggttttatgaattgagtattaaatttgaaagtaaattacagttctataggtttataaaaaatcagtttttaaatcaaagctatatatgaattgagtattaaatttgtgttcaaatcacaagtttacaggttgaataaacgtgcgaagaaaccttttttctcttcttgaggttttggttctgacatttctgactgtgaagctgtgctgtcattttctgctttcgcttccaatgaatcgttcgaagtagcttgtttagaagcttctgcatgggcttctgctacttgttgttcagcatcatgttgcgcgtctgcatctactgtagcttctttatttgaagtctcagctgcattttcatttttagactgctcaacgctggctttttcaattgcttcagttgcagaaatttgatcctctttatctactttagtagcagtgccatcgcctgcattttctgctttagtatccgtcttagcgtctgttgatgtattcactccagcaaccttcgaatctttactgtcagctttatcttcagtaacagcattcttttcaactttatttgttgattcagccaatactttagcttgagatgcttgtgcttcttggatagcctcttgtgatgtttggatggcttttaaggattcgctatttgaatcgattttagatgtaagttgattttgaagttcttttaattcttgttgttgctgatgtacttgattcatcatttgaccaagtaggtgacgttcttcgcgcattttctggatttctaggcgtaaatcttctactagttgagcgacattttgattagtaggtaagtttttgtcatcgtttttgacaatgacttgcaggaagtctttttctttttctaattcatcaaacgctagatcataactatttgtttgttttactttgtcggcaatgtctttgaaaagctcgatatcttcttctttgaaatcagttgcttcacgaccacgatattcagtcttgcttagttggtaaccacgttcttctaaatgttgaacaattttacggacttgcttctcacttagttctacgcgttgtgcaaattctttagttaacatactttaaagtcctttctgcatatactttatgtatactgacgtttgtctacgggcagtgaaacgtcagtcttgcttcatacatagtttaaacgttattgttagtgatttcaagtttgtttaaaatggtttacgtaaatccatttcttctaataaagcataaataatttcacgtgcgataccattggcaaatacatacttcaaaatataatttgatttaacacttgtaccgtagatatcctttgtcagtttaatatttttctttaaaaataagtccacttttttagtgtgaccatcattagttggatgaatgtaatcaatttcagtttgtctttcaaattgatgttcgtataaaaactgtctacggtgttcaataataagtccgttatcttgtgttaaatctgcaggttctttagggacttccatcattaaaaagttaatacttctagaatgaacaaggtttgataataagtttagttcatgttcaatttgatgtaatgtttgtgtcattaactcatcatggttgggtaggtcttttgcgaataaataaattaaaaatgctgaattggttgtggcttcataatgtgcagttgctagactgacaacaacatcgttttctaagcctacgataaagacataatcgttttcggttttgttgttttctaatgagcgtttgatgatacgtttatcttcagttaaagataaatttaacttagtatcgtaaagtttaagtgcttcgttgtaatgtggatctttgacagattgaatggttttaaattccataagaacacctccccaatttaaataatattatagcataatcgcctgctgtaaaagattgttcataaacttttaaatggtataaaaaactgtactatcttaaattagacagtacagtaatctcattttgaattcagtgtgataactaagctttgggacctttagatgcttcagcaaaatgagtaatatcaatttcttcatatgctgagttatgttcttgaacttctttatgtgatgatttgtcacgaaccgctacaactaacattttatcgtctaaaataagttgtttatatttttctaattcatcaggcgctaagttgtagcgtgataaaactgcatgttcaccatcttctcctgttaacagtttagtcattctatcactaaatgttccacttgttgagataagggagatttcagagtcgtgtaagtcatttaggtgtaatttacttttactaataattgttagctctgattctaaataaccttcagatttcttttgattgattacgttgtataattcgccagtgtcatttactacagtaatatctgccatagttgtcgcccctttaaaaatttgtttatttaatcttttacccttcttattataaagtaaaacccttacattattaagttataagtcttcattcgcattaaacgtctctgtacatttataaaactattaaaagattacctaagcagttattgaaaaaatgccgaaaatttgctattatcgttaaataatttacataaactcatataatctaaagaatatggctttagaagtttctaccatgttgccttgaacgacatgactatgagtaacaacacaatactaggagtagcttcagccattaaattgtaaccatggtgggtgatttatatcattttatatgatggtcacagtttatttgatgaaacttcttttacattgattgcatgacaaattcgttatgcatgttcgttcactcataaaccctgaaactattatttagtttggggatttttttgtatctagcaccaatttaagagcaaaatgtttcacacaaatctgaggaggttttaagagtggagttactaggacaaaaagtaaaggaagacggcgttgtcattgatgagaagattttaaaagtcgatggatttttaaatcatcaaattgatgcaaagttaatgaatgaagttggtcgcactttttacgagcaatttaaagataaagggattactaaaatcttaaccattgaagcttccggtatcgcacctgcaatcatggctgcactgcattttgatgtgccatgtttatttgcgaaaaaagcaaaacctagcactttgacggatggttattatgaaacatctattcattcatttactaaaaataaaacaagtacggtcattgtttcaaaagaatttttatcagaagaagatactgtactcatcatcgatgactttttagcaaatggtgatgcttcattaggattatacgatatcgcacagcaagcgaatgctaagacagctggtattggtattgttgttgaaaagagtttccaaaatgggcatcaacgtttagaagaagcaggtttaacagtttcttctctctgcaaggttgcttcactagaaggaaacaaagtgacattggtggtagaagaataatgaaaaatttaatcctaagtgttcaacatcttttagctatgtacgcaggtgccatcttagttccaatcattgttggtacaagtttgaagtttacacctgaacaaatcgcttacttagttacagtagatatatttatgtgtggggttgccacatttttacaagccaataaagtaacaggaacaggattaccaatcgttcttggatgtacattcacggctgttgcgcccatgattttaattggtcaaacgaaaggaatagatgtactttacggttcgctatttttatcagggatattagttattatcatcgcgcctttcttttcacatcttgtaaaattcttcccaccagtagtaacgggtagtgttgttactatcattggtatcaatttaatgccagtagcaatgaattacttagctggaggtcaaggtgcaaaggactatggagatgttaagaacattttgttaggtttaatgacattaatcattattcttgttttacaaagattcacaactggatttattaagagtattgctatattaattggactcgttttaggaacgataggtgctggcttacttgggatggtcgatattaatcaagtcaatcatgccggttggttaggcatcccagtgccgtttagattctcaggatttagctttgatgtgacatcgacgttagtgttctttattgtagctatcgttagtttaattgagtcgacaggtgtctatcatgcgttaagtgaaattaccggtaagaagttagaaagaaaagattttcgtaaaggttatactgcggaaggtctagcgatagtgttaggttctatattcaattcatttccgtatacagcctattcgcaaaatgtaggacttgtttctttatccggcgctaagaaaaataatgttatatacggcatggtcgtgttattacttatatgtggttgtatacctaagcttggtgcattagcaaatatcataccgctacctgtgttaggtggtgcgatgatagctatgtttggcatggtaatggcatatggtgttagtatattaggacatatcgattttaaaaatcaaaacaatttattaattattgctgtatcagtaggattaggtactggtataagcgctgtaccacaagcatttaaaggtttaggtgaacaatttgcatggttgactcaaaacggaattgttttaggcgcaatctctgcaattattcttaatttcttttttaatggaataaagtataaacaaacggaagaaaatgtgaaataatataactaattaatttgaaaaatggaggctgtttttaatgtgggaaagtaaatttgcaaaagaatcattaacgtttgatgatgtgttattaattccagcacaatctgatattttaccgaaagacgttgatttaagcgtacaattatcagacaaagttaaattaaatattccagttatttctgctggtatggatacagtaactgaatctaaaatggcgattgctatggctcgtcaaggtggtttaggtgttattcataaaaatatgggcgttgaagaacaagcggacgaagttcaaaaagtaaaacgctcagaaaatggtgtcatttcaaacccatttttcttaacaccagaagaaagtgtttatgaagcggaagcattaatgggtaaataccgtatttcaggtgtaccaattgttgataataaagaagatcgcaacttagtaggtattttaacaaaccgcgacttacgttttattgaagacttctcaattaaaattgtagatgtaatgacgcaagaaaatttaattacagctccagtgaatacaacacttgaagaagcagaaaaaattctccaaaaacataagattgaaaagttaccattagttaaagacggacgtctagaaggtcttattactattaaagatattgaaaaagttatcgaattccctaatgcagcaaaagatgaacatggtcgtctacttgtagccgcagcaattggtatttcaaaagatactgatattcgtgctcaaaaattagtcgaagcaggtgtggatgtcttagttatcgatacagcacatggtcactctaaaggcgttatcgatcaagtgaaacatattaagaagacttacccagaaatcacattagtagctggtaacgtagcaactgcagaagcaacaaaagatttatttgaagcgggtgcagatattgttaaagttggtattggcccaggttcaatttgtacgacgcgtgttgtagcaggtgttggtgtaccacaaattacagcaatttatgattgtgcaactgaagcacgcaaacatggtaaagctatcattgctgatggtggtattaaattctcaggagatatcattaaagcattagctgctggtggacatgcggttatgttaggtagcttattagcaggtactgaagaaagtccaggtgctacagaaattttccaaggtagacaatataaagtataccgtggtatgggctctttaggtgcgatggaaaaaggttcaaacgaccgttacttccaagaggacaaagcgcctaagaaatttgttcctgaaggtatcgaaggacgtacggcttataaaggtgcgttacaagatacaatttaccaattaatgggcggtgtgcgtgctggtatgggttatactggttcacacgatttaagagaattacgcgaagaagcacaatttacacgtatgggtcctgctggtttagcagaaagccatccacataatattcaaattacgaaagaatcaccgaactactcattctaattaagataaaggagaacgacaaatatggaaatggcaaaagaacaagagttaatccttgtcttagactttggtagccaatacaaccaattaattacacgccgaattcgtgaaatgggcgtttatagtgaattacacgatcatgaaatttcaattgaagaaattaagaaaatgaatccaaaaggtatcatcttatcaggtggtccaaattcagtttatgaagaaggttcatttacaattgatccggaaatatataatttaggaattccagtacttggtatttgttacggcatgcaattaactactaaattattaggtggtaaagttgaacgtgccaatgaacgtgaatacggtaaagcaatcattaatgcgaagtcagatgagttattcgctggcttaccagcagaacaaactgtttggatgagtcattctgataaagttattgaaattccagaaggctttgaagttatcgctgatagcccaagcacagactatgcagcaattgaagataagaaacgtcgcatttatggtgtgcaattccatccagaagtacgtcatacagaatatggtaatgatttattaaacaacttcgtacgtcgtgtttgtgattgtaaaggacaatggacgatggaaaactttatcgaaattgaaattgaaaagattcgtcaacgcgtaggcgaccgtcgtgtattatgtgcgatgagtggtggcgtagattcatctgttgttgctgtattattgcataaagcaattggggatcaactaacatgtatctttgtagaccatggcttacttcgtaaaggtgaaggcgacatggttatggaacaattcggtgaagggttcaacatgaatattattcgtgttaatgcgaaagatcgttttatgaataaattaaaaggtgtttcagatcctgaacaaaaacgtaaaatcattggtaatgaatttgtatatgtatttgatgatgaagcatcaaaacttaaaggtgtagacttccttgcgcaaggaacactatatacagacgtcatcgaatcaggtactaagacagcacaaacaatcaaatcacaccacaatgttggtggattaccagaagacatggaattcgaattaatcgaaccaatcaatacattgtttaaagatgaagtacgtaaattaggtattgaattaggtattccagaacatttagtgtggagacaaccattcccaggacctggtcttggtattcgtgtacttggagaaattactgaagataaactagaaatcgttagagaatcagacgcgattttacgccaagtgattagagaagaaggtcttgaaagagaaatttggcaatacttcacagtgttaccaaacattcaatcagtaggtgttatgggagactaccgtacgtatgatcacacagtaggtatccgtgcagtaacatctatcgacggcatgacaagtgacttcgcacgcatcgattgggaagtcttacaaaagatttcaagtcgtatcgtaaacgaagtagaccacgtcaatcgcgtagtctatgacattacatcaaaaccaccaagcacaattgagtgggaataattatatataataaaaccacctgtttgcacgggtggtttttaatttgagtagttggaaaattacaataaggacggaaaaggggtaaggtgttctaagtttgcgttttaattcatcaataaggcaattttccgtgtttatttttatataaaatttcatattgtttaggatcttcttgttttaaatcataaattatagtttcgtctactattttttctaattcaagtgtattaaagctccagtcatttgttgttattataaatattttttggactgggttgttatttatatgattaattagcctaggagtatctgtttctattattagagcagattctacaggatagtaaatagcaaagtctccgtgataaattgtgtttctttcatagaggttaacctctaaggttaaattactcaatttgaagattttgttttgagttatatttttaggaataattcgattatctactatttgttttaggttgcctattgaacgagtgtgtatcgtcccttttgtgtaatcggaattatttaaagctcttaaaacagttgttaatttatactcgttaatataaccctttactaaagccatccgtttatcgctacctataaaatctttcagttttttgttgaattcatttttgttgtgcataatattttatcctttccattagttgattgttttcatttgttcaaatctctattcatttactcggatacagggctgtgtatttgcagagtaatattatgattggaataaccaacgcgttccgtattcgttttgagtgacgcagctagctacgataataatgacatgtggcttataacacattgtgtaatttattgtgtgttttgtgatgtctatattggttgcagattgttgtatatttcacttaaagggcatttatataaaaaaagaggccagatgacgtatcatctgaccttcagctaaaacgctgagaatatgtcattcttcaagagaatgaagccggaatggttaccgggaatttgtaaatcaattatatcagatgtaatattacaattcaattagaaaagaactttatctttaattgcttttcgatttcattcatgtcatcttctgaaattattatcgttccagtaggatcagaatcatttattttgcttatacgtcttttgcttattgttgtaattgctgatatattaacgtatgtatctttccctttgtgcttggaataaacacctatcactctatacagttcattagctttttgatttaagttagacaaaagctttttatcttctgtgctaagtttaatgtcaatatctctatatttttgggttaatgcttgtactttactactgatatcgataatctgtttttttaaatctgttgctgttagatttagcaccgattcgtttaacttcaaataatttttattacctttggaagaaagtggaactattgtaactgtttcttttcctttattgtctttgttatctaatattacacaaaaatgattaccagaaaactcacttccaatattactccctagttttacatataccactgttcctctactaaatgatttataatatctttttttattgcttgtaacatcgctatgtatagcaattgaataaaactctagccaatgaggcatgtatataactttcatgtttttactatcggattttgaataagcttgttttagttttttgtttgacgtatttaatttactatttgcttgattgatatttttagacattaaatagtgttctcctaatcaatttattcttctttatatcagcattattagcactgaaattaacatgaatggtacgaaaatagatgttactataaaaccaacaatttttattaggtggaactcatcaattttgtatttagcaaatttcgcaatgaccttctatttattcgctttttatagttcatgtatgtgtaaaaaagtctatattgaacatctaattataagcgaattcctaatgctaaaagcaatctaacttacttaaatattattatgagtttttattgaaattaaataaatttaaactatttcttagtctctccatatcgttggaagttggttctttatataatcagataaattagaatcttcaagtaatgtatctttaaaaagttcagtttctaaatcaactttaaaatttgctttaaaacatcatgttccatttttaaatgttgaacttctttgcgtaattttattaactctttttcatcactttttaaattatcttgatgattgaagggtccagtattttggtgttgttttatcgaatttgagataattgagggttttaaatcatactttcgtataatttcattcttaagcttaccatttttatataatctaaccatttgtaacttaaactctgaactaaatgttcttctttcttttgtcataataagattgactactttcttaatttaacaatatctattctcatagaatttgttcaattaagtgtagacgattcactgacacatcataagtacgtaaggaattttgatcgttcattgttattgctttatgttttagggaatgtgctattgaagggtttaaagatgtttgaaatgtcttggtttcttgacttatatagttatgaaagagggcgttgtcctttatagcatttctgagattagaaatgctataaataaagttattaagattttttgttttcatgtaatttaagaaatggatttgtttttagtgggttatttttaattctgttcttaaatggtttgaattttgcggttgcaaatatgatagcagcttcttttgacaaagtaatagaacctttttcttctggtaccatgatattcactccttgtacaattggatttaaatcttataaaataattttactatacaaaataggttgtgtaaatagtttcttattgttaccaaataatatgtttggaagcgttatgtaatgccaatcaacaccgaagttctcatgtcctctttccttttacgactacatatattgttaataatattgaaataataaacttatagtgataatttatttaatagatccatgagagtaggaaccccaccatacgggaatttcgaaatcatgggttttttgttttaaaggattgatgcaatagataaagtagccattctaatatatggagtatttatcagctaaaaattaaaacagatatgggttttcttcattaaatcatttttctataaggaaacagaggaaacgctactgtcacctctgcttgaaataattaggatgaaatactctgagtttatgaacgtccacacccaaaacactcaaaccctccaaactctcaaccccagactacatctccaaacccccaaacaccaatacttaccaaagcattgatatgagtgccaatactggcaatgtgccttgtttgaaaaagatactaatattgcttgaaaggccaccataaatagcaacgccaatgatatacactaaaatagctgtgcatatttcttttggattactgctgataaacaaaccgtatattagcaaaactccgattaaaccgttatatacgccttggttcttcaaaagtaggttaatatttttgtctttcaatttatcgacgcttatattaaatgtctcgctagtctttttggaagttgtagcaatcgtttcaaggtacataatatagaaaaactctaatgccacaaatatgattaaaattgttgagatgatattcactgtaacgctcctttattattaaatattttcttgtaaaaatgattgcagtgtctgtggttgatcattgactaattgtttgaaatcattggattcttggtctaatagtcctcttgctcctgcgtggtacattgatgccaataatgcaccaaagcctttaggttcatcgtacatttctgcaaatgtctctaatgaaacgggttcatatttaatttctgtgcctgatgcctcagataaaatagcagcaagttctttcatatcataactatagcctgataataaatagcgtttgccccaagtatctggatttttaataatagcaatgacacctctagcaatatcatttctagtaatataattaatacgaccatcaccagctggataaatcagtttatgcatattcatcaattctggtaaatagggtttaagtggatccatgtacattgccattcttacatacgtataatcaatgccacttgttgacaataaacgtgatgcatatccgaaataagggctcatatggaatggattattatgctgatctgcgtaataacctatgaaaatgatatgagcaacgccgctctgctttgccgcatatactaaattttccacttcaggaatacgtttgaatgatggatggataatacttggaataaacacaacggtatccattcctttaaatgcttctaccatgctttcttgattaaaataatctaattgtcgaacagaaacttttccacgccaatcatctggaactttctcaacatttctaacaccaatgtgaaaatgatctatgtgatttgcaatggcttgatttgtaatatgtgtgcctaaatgacctgtagcacctgttaacataatattcattcacttcatctcctaatctttatatacataacataatacttattcgattgttttcaaaacatttgattttataaaaaattgtaatctgtatttattatcgctgtgtatagtaaatacgtatatgttattaatgttgaaaataccgtaatgacgcgttttagttgatgtgtatcactaatatctttgaaaattttaatcaggtactacgacaatatgatgtctgttttgtgtctgaaagttttacagtttttaaaataaaaatggtataaagtgtgatttgtataaaaaagagtctcgacggataagaattgattaataacagttagcattttattaattaccttaacaatgattcaagtttagttaaatgaggtttaatttgaaaggggatagcgcctcaatataatgtaggtagattgttcatattacgtaattgaaaaatcaaatttaaatagattggggctaaaaattatgaaatttaaagcgatagcaaaagcaagtttagcattgggaatgttagcaacaggtgtaattacatcgaatgtacaatcagtacaagcgaaaacagaagttaaacaacaaagtgaatcagagttgaaacactattataataaaccggttttagagcgtaaaaatgttactggatataaatatactgaaaaaggtaaagattatatagatgttatagtagacaatcaatattctcaaatttctttagttggatctgataaagacaaatttaaagatggagacaactcgaatatagatgtgtttatccttagagaaggtgacagtagacaagcaacaaattactcaattggtggcgtaacaaaaacaaacagtcaaccttttattgactatatacacacaccaatccttgaaatcaagaaaggtaaagaagaaccacaaagtagtttataccaaatttataaagaagacatctcattgaaagaacttgattatagattaagagaacgtgcaatcaaacaacacggcttgtattcaaatggtcttaaacaaggtcaaattacaattacaatgaaagatggcaaatcacatactatcgatttaagtcaaaaacttgaaaaagaacgtatgggtgattctatcgacggcagacaaatacaaaaaattctagtagaaatgaaataatactttctaacaacaaagcgctatgttgaatagtgcttgttatggaaatatatggaagttaagcgacgtactgttgcttagcttctttttttgaggggaaaagttacaaaactcacacaaacagtcgcaccacgcattatcttttgcttaaatagcttaatcatattttatgaatagttaaaaacaggttaatgtgaatatccgaatacagctcctataatatgggtgtatggttcaaattacgtaataaaacaatctaattataatagattggagcatacaactatgaaaatgaaaaatattgcaaaaataagtttgttattaggaatattagcaacaggtgtaaacactacaacggaaaaaccagttcatgccgaaaagaaacctattgtaataagtgaaaatagcaaaaaattaaaagcttattatactcaacctagtattgaatataaaaatgtgacaggttatatcagtttcattcaaccaagtattaaatttatgaatatcatagatggtaattctgttaataaccttgctttaattggcaaagataagcaacattatcatacgggtgtacatcgtaatcttaatatattttacgttaatgaggataagagatttgaaggtgcaaagtactctattgggggtatcactagtgcaaacgataaagctgtcgacctaatagcagaagcaagagttattaaagcagatcatattggtgaatatgattatgactttttcccatttaaaatagataaagaagcgatgtcattgaaagagattgattttaaattaagaaaataccttattgataattatggtctttacggtgaaatgagtacagggaaaattaccgtcaaaaagaaatactatggaaagtatacatttgaattggataaaaagttacaagaagaccgtatgtccgatgttatcaatgtcacagatattgatagaattgaaatcaaagttagaaaagcttaatacacatacttgacgacgaaataatttgaaattgaaatagagaggttaagtgacgatcaaacgttgcttaacttctttttaatgcttaaaaatcatttcaaaggcacatagaaacgctatattaacctcataatcactcattattttttgcttaaattacttaataatacttcaataattgttaaaaagggtttaatgtgattatcttagaacgccatctataatgatgttgtatgattcaaattacgtaaaaagacaatcgaatataatatagattggagtatacaattatgaatatgaaaacaattgctaaaaccagtttagcactagggcttttaacaacaggcgcaattacagtaacgacgcaatcggtcaaagcagaaaaaatacaatcaactaaagttgacaaagtaccaacgcttaaagcagagcgattagcaatgataaacataacagcaggtgcaaattcagcgacaacacaagcagctaacacaagacaagaacgcacgcctaaactcgaaaaggcaccaaatactaatgaggaaaaaacctcagcttccaaaatagaaaaaatatcacaacctaaacaagaagagcagaaatcgcttaatatatcagcaatgccagcgcctaaacaagaacaatcacaaacgacaaccgaatccacaacgccgaaaactaaagtgacaacacctccatcaacaaacacgccacaaccaatgcaatctactaaatcagacacaccacaatctccaaccataaaacaagcacaaacagatatgactcctaaatatgaagatttaagagcgtattacacgaaaccgagttttgaatttgaaaagcagtttggatttttgctcaaaccatggacgacggttaggtttatgaatgttattccaaataggttcatctataaaatagctttagttggaaaagatgagaaaaaatataaagatggaccttacgataatatcgatgtatttatcgttttagaagacaataaatatcaattaaaaaaatattctgtcggtggcatcacgaagactaatagtaaaaaagttgatcacaaagcagaattaagcgttactaaaaaagataatcaaggtatgatttcacgcgatgtttcagaatacatgattactaaggaagagatttccttgaaagagcttgattttaaattgagaaaacaacttattgaaaaacataatctttacggtaacatgggttcaggaacaatcgttattaaaatgaaaaacggtgggaagtatacgtttgaattacacaaaaaactgcaagagcatcgtatggcagatgtcatagaaggtacaaacattgataaaattgaagtgaatataaaataatcatgacgttctctaaatagaagctgacatcggtaaaacaagaagttaagtgacaacggtttacatgttgcttagcttcttttattatgcgtaatgatgtaaaagacgaatattcatttgtttgtaaaagtggcatttctatgtcttaaaagtgacgaatcctcaaatgtgccaagtgttgaatcacatcaaaatcagttttatttaacgaacattatggatttcttaatttacttaacgatgattcaaatatagttaaacaaggtttaatgtgaatggagcaatacgccatctataataaagctgtatgattcaatgaatgtaatcgaacaaatctaataattacgaatggagcatacaactatgaaaataacaacaattgctaaaacaagtttagcactaggccttttaacaacgggtgtaatcacaacgacaacgcaagaagcaaacgcgacaacaccatcttccactaaagtggaagcaccacaatcaacaccgccctcaactaaagtagaagcaccgcaatcaaaaccaaacgcgacaacaccgccttcaactaaagtggaaacaccgcaacaaacaccgaacgcgacaacaccatcttcaactaaagtggaaacaccacaatcgccaaccacaaaacaagtaccaacagaaataaatcctaaatttaaagatttaagagcgtattatacgaaaccaagtttagaatttaaaaatgagattggtattattttaaaaaaatggacgacaataagatttatgaatattgttccagattatttcatatataaaatagctttagttggaaaagacgataaaaaatatgatgaaggagtacataggaatgtcgatgtatttgtcgttttagaagaaaaaaataaatatggagtggaaagatactcggtcggtggtatcacaaagagtaatagtaaaaaagttgatcacaaagcaggagtaagaattactaaagaagataataaaggtacaatctctcatgatgtttcagaattcaagattactaaagagcagatttccttgaaagaacttgattttaaattgagaaaacaacttattgaaaatcataatctgtacggtaacgttggttcaggtaaaattgttattaacatgaaaaacggtggaaagtacacgtttgaattacacaaaaaattacaagaaaatcgcatggcagacgtcatagatggcactaatattgataacattgaagtgaatataaaataatcatgacattctctaaatagaagctgtcatcggaaaaacaagaagttcagtgacaacggcctacatgttgcttagcttcttttgttatgttcgatgatttgagaacccgaattttcgatgggtccaaatatgacgtggaagagtcctgaatttatctgtaaatccctatctatcgggtgtgaagcacaacggaatcagttttatttaacgaacattatagattccttaatttacttaataatgattcaatgattattaaagatggtttaatgtgaaaggtcaaatacgccaattataataaagctgtatgattcaatagacgtaagcgaacaaatctaataattacgaatggagcatacaactatgaaaatggcagcaattgcgaaagcaagtttagcattaggtattttagcaacaggaacaataacgtcattgcatcaaactgtaaatgcgagtgaacatgaagcaaaatatgaaaatgtgacaaaagatatctttgacttaagagattactatagtggcgcaagtaaggaacttaaaaatgttactggttatcgttatagcaaaggtggcaagcattaccttatctttgataaaaatagaaaattcacaagagtacagatatttggtaaagatattgaaagatttaaagcacgcaaaaatccgggattagacatatttgttgttaaagaagcagaaaatcgcaacggcacagtgttttcatatggtggtgtcactaagaaaaatcaagacgcttattatgattatataaacgcaccaagatttcaaatcaagagagatgaaggtgacggtattgctacgtacggtagagtacactacatttataaagaagagatttcacttaaagaactcgactttaaattgagacagtatttaattcaaaattttgatctgtataaaaagtttcctaaagatagtaagataaaagtgataatgaaagatggcggctattatacgtttgaacttaataaaaaattacaaacaaatcgcatgagtgatgtcattgacggtagaaatattgaaaaaatagaagccaacattagataattcaatgaaatatggataatagtaaaatatggatagtatagaggagttaggcaacataagttgcttagcttcttttttgtgttggcgagatgaaaatgaagcgtatcgatgaataataaaaacaccaataaaacttgtggaaatagttgatacttatagatgcgtgatgtcgctttagtgacatgaaacaatgtggaaaacataattaaattgagggaaagtgtgaatagttaaaaaattagcattgtgttataaaaaataattaatactgttaggatttcattaactaacttaacgttggttcaaaaatagttaaaaagaggttaattcatagcgcagtatctcgcttatataatgatagtagattgttcgtattacgtaattgaattaatcatataaaaatatattaagacaaaatttataaatagattgggagaatagtactatgaaattaaaaacgttagctaaagcaacattggcattaggcttattaactactggtgtgattacatcagaaggccaagcagtccacgcaaaagaaaagcaagagagagtacaacatttatatgatattaaagacttatatcgatactactcatcagaaagttttgaattcagtaatattagtggtaaggttgaaaactataacggttctaacgttgtacgctttaaccaagaaaaacaaaatcaccaattattcttattaggaaaagataaagataaatataaaaaaggccttgaaggccagaatgtctttgtggtaaaagaattaattgatccaaacggtagactatctactgttggtggtgtgactaagaaaaataacaaatcttctgaaactaatacacatttatttgttaataaagtgtatggcggaaatttagatgcatcaattgactcatttttaattaataaagaagaagtttcactgaaagaacttgatttcaaaattagaaaacaattagttgaaaaatatggtttatataaaggtacgactaaatacggtaagatcactatcaatttgaaagacgagaaaaaggaagtaattgatttaggtgataaactgcaattcgagcgcatgggtgatgtgttgaatagtaaggatattcaaaatatagcagtgactattaatcaaatttaaattaaacaatcaatgactttaaagtaataaatttgaagcagcttaacgatgaaatgttgaataaatacgtacatcctccaaaaaggggcgtatctaaatcaacagtgtcgttaggctgtttttatgttttataacgcagggtatgagcgtactaaaaattcacattacttctgaaagtgatgtccattgaatattaattagttcttcattaaccatgatttaattttaattaaacgagtgttaatgtcagtctgtctcaatgccctttataataaatgtgtattattcaaattacgtaataaaagcaatccaatatattaagattggagcatatgaatatgaaatttacagcgatagctaaagcgatatttgtattaggaatattaacaacaagtgtaatgataacagaaaatcaatcggttaatgcaaaaggaaagtatgaaaaaatgaaccgtttatatgatacaaacaagttacatcaatactattcaggacctagttatgagttaacaaatgttagtggccaaagtcaaggttattatgactctaacgttttgctttttaaccaacaaaatcaaaagttccaagtatttttattgggaaaagatgaaaataaatacaaagaaaaaacacatggtttagatgtctttgcggtaccagaattagtagatttagatggaagaatatttagtgttagtggtgtaacgaagaaaaacgtaaaatcaatatttgagtctctaagaacgccgaacttactagttaaaaaaatagacgataaagacggtttttctattgatgaatttttctttattcaaaaggaagaagtgtcattgaaggaacttgattttaaaataagaaaactgttgattaaaaaatacaaactgtatgaagggtcagctgataaaggtagaattgttattaatatgaaagatgaaaataagtatgaaattgatttaagtgataaattagatttcgagcgtatggcagatgtcattaatagtgaacaaattaagaacatcgaagtgaatttgaaataatcaatgatatatagaataaaagcttaagaagcggtttaataatcccatgtttaatgattttgatacgtgttttaataataaaaacatatcgaacattgactacgttattaagctgcttttttgtacactttgtatcgaataacttaagatctaaaactaatcggaaagaacaatgattcccccaaaaaaatttatgttgctattaaaaatcagttaatacgaatgttaaaatacgtttgattttcattaataatgattcaagtttatttaaatgagcgttaatgtcagtctgttttgatgcaccttataataaagacagatagttcaaattacgtaatcataacaatccaatatatcaagattggagcaaataaatatgaaattgactgcattagcaaaagcaacattagcattaggaatattaactacaggtgtgtttacagcagaaagtaaagctgttcacgcgaaagtagaacttgatgagacacaacgcaaatattatatcaatatgctacatcaatactattctgaagaaagttttgaatcaacaaacattagcgttaaaagtgaagattactatggttctaacgttttaaactttaaccaacgaaataaaactttcaaagtgtttctgcttggtgacgataaaaataaatataaagaaaaaacacatggccttgatgtctttgcagtacctgaattaatagatataaaaggtggcatatatagcgttggcggtataacaaagaaaaatgtgagatcagtgtttggatttgtaagtaatccaagtctacaagttaaaaaagttgatgctaaacatggcttttcgataaatgagttgttctttattcaaaaggaagaagtatcgttgaaggaactggattttaaaataagaaaaatgttagtcgaaaaatatagattgtataaaggcgcgtcagataaaggtagaatcgttattaatatgaaagacgaaaagaaatatgtaattgatttaagtgaaaaattaagttttgatcgtatgtttgatgtaatggatagtaagcaaattaaaaatattgaagtgaatttgaattagtttgagttaatagcataatagcttaagaagcgacttaacgacaaaatgtgaattgacatctgtgtccttatataaggaactgtgttaaatacattactgttgttaagttgtttttgtaattcaaagagcagaacagagtaacatcatcagttgtagtaaacgataatccagtaaaacaactaaatgaaataatgaaagtcatttaacctgaacattaaaatatatttgtttttcattaagaataattcaagtatatttaaatcgaggttaattatcgtatgaaacgatgcacgttataataaaaatgtatgattcaaattacgtaatgaaaacaatccaatatattaagattggagcaaataaatatgaaatttacagcattagcaaaagcaacattagctttaggaattttaacaacaggaactttaacaacagaagttcattcaggtcatgcaaaacaaaatcaaaagtcagtaaataaacatgacaaggaggcactataccgatactacactggaaagactatggaaatgaaaaatattagtgctttgaaacatggtaaaaataacttgcgttttaagtttagaggtattaagattcaagttttactgcctggaaatgataaaagtaaatttcaacagcgtagttatgaggggttagatgtgttttttgttcaagaaaaaagagataagcacgatatattttatactgttggtggtgtaatacagaataataaaacatctggagttgtcagtgcaccaatattaaatatttcaaaagaaaagggtgaagatgcttttgtgaaaggttacccttattacattaaaaaagaaaaaataacactaaaagagctggattataagttgagaaagcatctaattgaaaaatacggactttataaaacaatctcaaaagatggtagggtcaaaattagcttgaaagatggcagtttttataaccttgatttaagatctaaattaaaatttaaatatatgggggaagtcatagaaagcaaacaaattaaagatattgaagttaacttaaagtaaataattacgaataataaaaagtaattgaagcggcttaacggtgaaatgtaaattggtgcgcatagcttatacaaaaaggatgcatcaatcgatatcgtcgttaagccgtttttgtttgtgtgtcatgaatcctatcccaatctccatgaatataaaaattccaccaccaacatcaaaattctccacatcgcaacataaccaaatgttataataaatctattacacaaagagataaattacttattcaaaggcggaggaatcacatgtctattactgaaaaacaacgtcagcaacaagctgaattacataaaaaattatggtcgattgcgaatgatttaagagggaatatggatgcgagtgaattccgtaattacattttaggcttgattttctatcgcttcttatctgaaaaagcggaacaagaatatgcagatgccttgtcaggtgaagatattacgtatcaagaagcatgggcagatgaagaatatcgtgaagacttaaaagctgaattaattgatcaagtcggttacttcattgaaccacaagatttattcagtgcgatgattcgtgaaattgaaacgcaagatttcgatatcgaacatctcgcaacggcgattcgtaaagttgaaacatcaacactaggtgaagaaagtgaaaatgactttatcggactgttcagcgatatggacttaagttcaacgcgactaggtaacaatgtcaaagaacgtactgcactaatttccaaagttatggttaaccttgacgacttaccattcgttcacagtgatatggaaattgatatgttaggtgatgcatacgaatttcttatcgggcgctttgcggcgacagcaggtaaaaaagcaggcgagttctatacaccacaacaagtatctaagatactggcgaagattgtcacagacggtaaagataaattacgtcacgtgtatgacccaacatgtggttcaggttcattattgttacgtgttggtaaagaaacgcaagtgtatcgttatttcggtcaagaacgtaacaataccacttacaacttagcgcgcatgaacatgttattacatgatgtgcgctatgaaaactttgatatccgtaatgatgatacgttggaaaatccagctttcttaggcaatacatttgatgcggttatagcgaacccaccatacagtgcgaaatggactgcagattcaaaatttgaaaatgatgaacgcttcagtggttacggcaagcttgcgccaaaatccaaagcagactttgcctttattcaacatatggtacattacctagacgatgaaggtaccatggcagttgtactcccacatggtgtcttattccgtggtgccgcagaaggcgtcattcgtcgttatttaattgaagaaaagaactacttagaagccgtgattggcttaccagcgaatattttctatgggacaagtattccaacatgtatcttagtatttaaaaaatgtcgccaacaagacgacaacgtattatttatcgatgcatccaatgattttgaaaaaggaaaaaatcaaaaccatttaagcgatgcccaagtcgaacgtattattgacacatacaagcgtaaagaaacaattgataaatacagttacagtgcgacattacaagagattgccgataacgattacaacctaaacataccgaggtatgtcgatacattcgaagaagaagcgccaattgatttagatcaagtccaacaagatttgaaaaatatcgacaaagaaatcgcagaaattgaacaagaaatcaatgcatacctgaaagaacttggggtgttgaaagatgagtaatacacaaaagaaaaatgtgccagagttgagattcccagggtttgaaggcgaatgggaagagaagcagttgggggatcttacagatagagtaattaggaaaaataaaaacttagaatcgaaaaagcctttaacaatatccggacagttaggtttaattgatcaaacagaatattttagtaaatcagtttcgtcgaaaaatctagaaaattatacactaataaagaatggagaattcgcgtataacaaaagttattctaatggatacccattaggggctattaaaagattaactagatatgatagtggtgtattgtcctctttgtatatttgtttttctattaaaagtgaaatgtctaaagacttcatggaagcatattttgattcgacacactggtatagagaagtttctggaattgcagttgagggtgcaagaaatcacggattattaaatgtttctgtgaatgatttttttactattctaattaaatatccaagtttagaagaacagcaaaaaataggcaagttcttcagcaaactcgaccgacaaattgaattagaagaacaaaagcttgaattacttcaacaacagaaaaaaggctatatgcagaaaattttctcacaggaactgcgattcaaagatgagaatggtgaagattatccagattgggaaaatagcaaaatagaaaaatatttaaaagagagaaacgaacgttctgacaaagggcaaatgctttcagtaactataaatagtggcattataaaatttagtgaattggatagaaaagataattcaagtaaagataaaagtaattataaagtagttaggaaaaatgatattgcatataattctatgagaatgtggcaaggggctagtggtaaatcaaattataatgggattgttagccctgcatatactgtgctttatccaacacaaaatactagctcattatttattggatataagtttaaaacacatagaatgattcataaatttaaaattaattcacaaggattaacatcagatacatggaacttaaaatataaacaattaaaaaatataaatatagatatacctgtattggaggaacaagaaaagataggtgatttctttaaaaaaatggatatattgataagtaaacagaaaatgaaaattgaaatattagaaaaagagaaacaatcctttttacaaaaaatgttcttataactttgataaatacatagattgcataagaataaaatttgtataatttaacataaaagttgtaaaagtaaagtgaattaaaaacgaacattaaatttaggcactgtgaaagcgcagtgtcttttttgtgtcgaaattgtgtacagaataagtagttaaataaagattaagttgagataaagtgttattcgtaaataaaagagagtagatcgataggaattgaatgatattagttaactatttattaaattacttaataatgattaatttttagttaaagtaagtttaatgtgaagcacgaccattgctcattataatgaatgaggattgttcgtattgcgtaatagaataaatcaaatagactaaaaattgggagcatagaattatgaaattaaaaaatattgctaaagcaagtttagcactagggattttaacaacaggtatgattacaactactgctcagccagtaaaagcaagtacattagaggttagatcacaagctactcaagacttgagtgaatattataaagggagaggatttgaattaacaaatgtaacaggatataaatacggaaataaagttacatttatagataattctcaacaaattgatgttacattgacaggaaatgaaaaattaactgttaaagatgatgacgaagtttctaatgttgacgtgtttgtagtaagagaaggtagtgacaaatcagctatcacaacatcgattggtggaattacaaagacaaatgggactcaacataaagatactgttcaaaacgttaatttgtcagtttctaagagtacaggtcaacacactacttctgtgacttcagaatactatagcatctataaagaagaaatctcattaaaagaacttgattttaaattaagaaagcatttaattgataaacatgatctttataagacagaacctaaagacagtaaaattagaattactatgaaaaacggtggctattatacatttgaattaaataaaaaattacagcctcatcgcatgggtgatacgattgatagtagaaatatagagaaaattgaagtgaatttataataatattcgagggagtatatcatgagagaaaattttaaattacgtaaaatgaaagtcggtttagtatcagttgcaattactatgttatatatcatgacaaacggacaagctgaagcatctgaaactaatcagaaggtaagtacaaatcaagaatcaaaagctgtttcgcagactgaacaaaattccaaagaaacaaaagcggcagagtcttctaaaaactttgtaaatttagatcctatcaaaccaggagctcaaaaagtaacaggcactacattaccgaatcatattattttacttaatatagatggtaaaagtgctgattcagttgaaggaggatatggtgattttataactgcaaatgacaaaggagagtttgagtatcctttaaataatcgtaaaattgtccataaccaagaaattgaggtatcatcatcaagccctgatttaggtgacgatgaagaggatgaagaagtagaagaatcttcaactgaaaaagctggtgctgaggaagaaagtacagatgctaaagctacatatacaacaccacgatatgaaaaagcgtatgaaataccgaaagaacaactaaaagaaaaagatggacaccaccaagttttcatcgaaccaattactgaaggttcaggtattattaaaggtcatacgtctgtaaaaggtaaagttgctctatctattaataataaatttattaattttgaagaaagagctaaaggtggaattagtaaagaagatactaaagctagttccgatggtgtttggatgcctattaatgaaaaaggatattttgattttgatttcaaaaaaaatccttttgataacttagagttaaagaaaaatgatgaaatctcattaacatttgcacctgatgatgaagatgaagcattgaagtcattaattttcaaaactaaagtaacgagcttagaagatatcgataaagcagaaacaaaatatgaccatactaaagtggaaaaagtaaaagtattgaaagatgttaaagaagatatacatgtagatgaaatttacggaagcttatatcatacagaaaaaggtaaaggtattcttgataaacaaggaactaaagagattacagggaagactaaattcgcgaatgcagtagtgaaagtatattctgacttaggtgatgcgcaattgttccctgatattcaagtagatgaaaatggtaaatttagctttgatgctgaaaaagctggtttcagattgcaaaatggagaaacattgaattttgcagtagttaaacctattactggtgacttattacatcaaggatttgtctctaaatatattgatgtatatgaatctccggaagaaaagaaagaacgtgaatttgaagaaaaacttgaaaacacgcctgcatatcataaattacatggtgataaaattgtaggatatgatgttcaaggtaatccatcaacttggttctatccattaggtgaaaagaaagttgaacgtacaacacctaaattagaaaaataattaataaaataaaacagcttaatgatgtaatgaaattagtgagttaatcactgacttcaacgtcattgagctgttttttatttgcttcgttacaaagcattattgaatttattttacgtgttcatattttgaaacatcaaagccgtcttgcttagctttgttgataatgtctttgattgaatgtagtcctttatcggcgaagtatgatcttaagttgtcttttgtagcttggtcagcattcttatctaataacacatcgatatagcttaattcatgttctaagaagtttgcgtcatcatgtagtacgagtccattttgagaataaactttcgcatctgcttgattaccatatccaacaacgccagttgctaatacacctaccattgccgtagctactaaaacctttttaaatttcatatctatcactcctctaaaaattgtaactctatcataacactgaatattaagaaaattacgtttattaagtcgatttaataatttttaataaatagttaaactgacaaatattgcttaaatgcaattaatctttaaaacggtgtttatggatttttcctactaaaaccttgatttcaaaaagggtttaaatcaaatgaaacaataataaaaaataatgcaacataataataagtacaaatttaattaagaaattaaattgattgtatatgtatattttggtaacgtaaaagagaaatatacaaaataattaattatttatatgaaaagagaatataaatgaagtataaaacaaagagacgtgaaacgatgcgatatttaaaaagactttcatggtacataagcatcttaattttaatagttgttatagctggttgtggcaaaggtaatgaaacaaaagaaggttcaaaagaagaacaaatcaaaaagagctttgcgaaaacgttagatatgtatccaatcaaaaatctcgaggatttatacgacaaagaaggatatcgagatagcgaatttaaaaaaagtgataaagggacatggacgatatacacagatttcgctaaaagtaataaaccgggtgaattggatgatgaaggtatggttttaaatctggataggaatactagaaccgctaaaggccattattttgttactacattttaccggaatggtaaactaccagatgaaaagaattataaaattgaaatgaaaaataataagattattttattagatgaagtaaaagatgataagctcaagcagaaaatagaaaactttaaatttttcggtcaatatgcaaatcttaaagaattgagaaaatataataatggtgatgtttcaattaatgaaaatgttcctagttatgatgttgaatacaaaatgagcaataaagatgaaatagttaaggaattaagaagtcgttataatatttcgactgaaaaatcacctatattaaaaatgcatattgatggggacctgaaaggcagttctgtaggttatagaaagttagaaattgacttttcaaaacgtgaaaacagcaaattatcagtcattgaatttttaagttataaaccagcgaaaaaatagtattgataaggaatattaggatgtgaaaaaatgggatatctaaaaaagcttgcactgttcataagtgttattattttgggcatttttataataggttgtgatagttcaagcgatactgcggaaaaagcaaaagaagattcaaaagaagaacaaatcaaaaagagctttgcgaaaacgttagatatgtatccaattaagaatctcgaggatttatacgacaaagaaggatatagagatggtgaatttaaaaagggcgataaggggacttggactttactcacaagtttttcaaaaagtaacaaaccgggtgaaatagatgacgaaggcatggttttatatctaaatagaaataccaaaaaggcaacaggttattattttgtaaataaaatttatgatgatattagcaaaaatcagaatgagaaaaaataccgtgttgaacttaaaaataataagattattcttttggataatgtagaagacgaaaaacttaaacaaaaaattgaaaattttaaattttttagtcagtatgccgattttaaagatttaaaaaattatcaagatggaagtataacaactaatgaaaatgtaccgagatatgaagcagaatacaaattgaataatagtgatacaaatgtaaaaaaacttagagatatttatccaattacaacgaaaaaggctccaatattaaagttacatatagatggtgatataaaaggaagttcagttggatacaaaaaaatagaatataaattttcaaaagttaaagatcaagagacaacattaagagattatttaaattttgggccgtctgatgaagatagctaaagtttattagatgtagaaataattctaaagcagagagacgtgaaatgatgggatattcaaaaaggtttgcattgtacataagcgttatgattttaatatttgcgatagcaggttgtggcaaaagtgatgaaacaaaagaaggttccaaagaagaacaaattaaaaagagctttgcgaaaacgttagatatgtacccaattaagaatctcgaggacttatatgacaaagaaggatatcgagatggcgaatttaaaaagggtgacaaagggacatgggttatcagttcagtaatggttaaacagccaaaaggtgaaattatgaaatcaagagggatgtatctatttttaaatagaaatacaagaaccgcaaaaggatattttattgtagatgaaacaagtaatgatactttaaaaaaaacagaggataaagaaaaacgttatccagtaaagatggtgaataataaaatagtacctattgatccaattaatgataaaggtgtaaaaaaagaaatagaaaattttaagtttttctcacaatatggtgattttaaagaattaaaaaattataaaaatggagaggtttcatacaattctgaagcccctatctactcagcaaaatatcaactgaaaaataatgattataatgtaaagcaattacgtaaaagatatgatatatcaacagaaaaggctcccaaattgttgttgaaaggtactggagatttaaaaggttcatcaatcggacataaggacattgagtttacattcgtggagaatcaagaagagaatatattttttactgatagtttggagtttacctcaagtgagaactattagctatgataaaaaaggggatacggaacaatgaataattttagaaaatgtgcgttgtgtataggacgtcagtcttaattctattagcatcaggttgcagtggcgtatttgacactcctgaagattcaaaagaaacacaaatcaaaaagagctttgcgaaaacgttagatatgtatccaattaaaaatcttgaggatttatacgataaagaaggatatcgagatggagaatttaaaaagggagacaaagggacgtgggttgttagatctgaaatgataattcaaccaaaaggtaaaagtttaacttcaagaggcatgatattatacatgaatagaaatactaggaccacaaccggttatttttcaatagaagaaatagattcaagaaaaagccttgatgaaagagaaacagaaaaaaagtatcctgtgaaaatgataaacaataaaattattccaactgaggagataaaagatgaaaagttgaaaaaggaaattgaaaactttaagttttttgtgcaatatggcagttttaaaggaatagagaattatgaaaatggtgacatttcctataattctgaagctcctatttattcagcgaaatataaactgaaaaatgatgattataatgttaaagaattacgaaaaagatataatattccaacagaaaaggcgcctaaattgttgttgaaaggttcgggggatttgaaagggtcttcagttggatataaggaaattgaatttatatttatagaaaataaaaaagaaaatatatatttttcagatggattaaacttaattccaagtgactaaaaataacacaaaggttgatagtactcaacaaatattaacatgatagagagaagtgaaaaaatgagggattcaaaaagagtagtattgtacataagcattatggtgttgagtatttttataattggttgtggcaaaggtaatgaaataaaagaagacgcaaaggaagaacaaatcaaaaagagctttgcgaaaacgttagatatgtatccaatcaaaaatctcgaggacctatatgataaagaaggatatcgagatggcgaatttaaaaaaggtgacaaagggatgtggacgatttacacagatttcgccaaaagtaatagaccaggtgtattagataatgaaggtatggttttaaatttggatagaaatacacgaacggccaagggatattattttgtagatactatatatgacaatcatgaaaactcttatagtaaaaattatagagttgagatgaaaaacaataaaattattttattagacaaggtggaagatcaaaaacttaaagaaagaatagaaaactttaaatttttcggacaatatgccgatttcaagagtttgaaaagttacaaccatggcgacgtttcaattaatagtaatgttccaagttatgacgcgaaatttaaaatgagtaataaagatgaaaatgttaagcaattaagaagccgttataacattcctactgataaagctccaatattaaaaatgcatattgatggggacttaaaaggcagttccgttggatataaaaagttagaaatagacttttcaaaagaagaaaatagcgaattatcaatagtcgattcattaaattttcaacctgccaaaaataaagatgatgaatgatagggaggatgtgaagcgatgggatattcaaaaaggtttgcattgtacataagtatcttgattttaatagttatggtagcaggttgtggtaaaagtgatgaaacaaaagaagattccaaagaagaacaaattaaaaagagctttgcgaaaacgttagatatgtaccctattaagaatctcgaggatttatacgataaagaaggataccgtgatggcgaatttaaaaagggtgataaggggacgtgggttctgtattcagctatagtatcacaaccaaaaggcgagagtttaaaatcacgaggaatgatattaaagttagatagaaataagagaactgctaaaggaagttatattattagagaattgaaagaagataaaaatcatgatgttcaaaaaaatgaaaagaaatatccagtgaaattggtgaataataggatagttttggtaaaagatgttaaagacaaaaagttaaaaaatgaaatagagtcgtttgaattattttcacaatatggaaactttaatcattttgatcggaatgagattactaatatttcatataatcctaatgctcccaattactctgcagaatataaaatgaagaaaaatgacagaaacattcaacagttgaaaaagagatttaatctaaaaactagcaagacaccaaaattattgtttaagggatctggagatataaaggggtcttctgtaggatataaggaaatagaaatcatatttagtagaagtaaagaagaagcatttattatgttgacagcgttgagttcgttccaagtaacaaaatgacaaaaagttgatattagtcaacaaaagcaaatattgagaataaagagagttgtgaaatgatgggttatttaaaaagacttgtattgtacatagttattatggttatgagtgtttttataataggttgtgataaatcaagcgatactgcagaaaatccaaaagaaggttcaaaagaagcacaaattaaaaagagtttttcgaaaacgttagatatgtatccaattaagaatctcgagaatctatatgacaaagaaggatatcgtgatggcgaatttaaaaaaggtgataaagggacttggacaatatcaacagattttgctaaaagcaacaagcaaggtgaaatgaatagcgaaggtatggtactacattttaatagaaatacgaggacagcaacaggatattatactgtaagaacaacttatgatgaagtggataagttggcacgcgaaaaaaaatatcgtgttgaatttaaaaacaataagatagttctattggacaaagtagaagatgaaaatcttaaacaaaaaatagaaaattttaaatttttcgggcaatatgccgattttaaagacttgaaaaattataaaaatggaagaatatctagcaatgaaaatgttccttattatgaagcagagtacaaaaggaataatagtgatggaaatgtaaaaaaacttagagaaaagtacccaattacaaccaagcagtctccaatattaaaactgcatatagacggcgatattaaaggtagctcagttggatataaacagatagaatacacattttctaaggagaaagatgatgagacttttatgagtgattttttgaacttcggtccatcacacagtaaatagtaaataaaaccaagggcataaactaatttaaaacaagagagaagtgaaaagatgggatattttaaaagagttgtactttacataattgttatggttgtgagtgtttttataataggttgcaataaatcaagcgatacttcagaaaagccaaaagaagattcaaaagaaacacaaatcaaaaagagctttgcgaaaacgttagatatgtatccaattaagaatctcgaggacttatatgataaagaaggataccgtgatggcgaatttaaaaagggtgacaaaggaatgtggactatatatacagattttgctaaaagtaataaacaaggtggattgagtaatgaaggtatggtcttatacttagatagaaatacacggactgcaaagggacattattttgttaagacattctataataagggcaaattcccagatagaaaaaattataaagttgaaatgaaaaataataaaattatcttattagataaagtagaagatataaatctaaaaaagagaatagaaaactttaaattttttggacaatatgcaaatcttaaagaattgaaaaattacagcaatggtgatgtctcaattaatgagaatgttccaagttatgacgcaaaatttaaaatgagcaataaagatgaaaatgttaagcaattaagaagtcgttataatattcctactgataaagcaccggtattaaaaatgcatattgatggtgatttgaaaggaagttctgtgggttataaaaagttggaaattgacttttcaaaaggtgaaaaaagcgatttgtcagtaatagattctttaaatttccagccggcgaaggtggatgaagatgatgaatgatgaggatggtgtgtaacaatgaagtctataaaaaggattggattgtgcataagtctgttgattttaatcatttttgcaacatcttgtggtagtaataagattactggagactcaaaagaagaacaaatcaaaaagagttttgcgaaatctttagacaagtatcctactgaaaatctagaagagttttatgataaagaaggatatagagatggagaatttgaaaaagatgataaagggacttggctaattagatctgaaatgaaaatccaattaaaaggagaaaatctggaatctaggggagcagttatagaaattaacagaaatactagaacggctaaagggaattatattgttagagaagttgttgaagatagcgatggaatgacacacaatcatacaaaaaggtatcctgtgaaaatggaaaataataaaatgattccattaaaatcaattgatgatgaaaaagtaaaaaaagaaattgaagaatttaaattctttgtacaatacgggaatttcaaagaattggaaaactataaagaggacgaagtgtcatataacccagaagtaccaatatactctgcacaatatcaattgaaaaacagtgattataatgtagagcaattacgtaagcgatataatatcccgacgcaaaaagcgcccaaattattattgaaaggctcaggtaatttaaaaggttcatcagtcggatataaaaatattgaatttacctttgttgaaaataaggaagaaaatatttacttcacagatagtgtctactttaatccaagcgaggataaataagtataattattattataaaaaatgacgttagaacatttaataataaagttaaatgaattacatgtattaaattgaataagttagttttgtttgataacataaaagttgaataatcactattttaataagttatatgaaatattcaaatgtttataaaattaaagcagagagatgtgaaatgatggagtatataaaaaaaattgctttgtacatgagtgtattacttttaatcatttttattgggggatgtggaaatatgaaagaagaacagaaaaaagaagcaaatacaaataaaacagattcaaaagaagaaaaaatcaaaaagagttttgcgaaaacgttagatatgtatccaattaagaatctcgaggaactatatgacaaagaaggctatcgagatggcgaatttgaaaaaggtgacaaagggatgtggacgatatatacagatttcgccaaaagtaataaaccgggtgaactaagtaatgaaggcatggtcttgtacttagatagaaacacacgcacagctaaggggtactactttgtcaggacgttttatcgcaaggataaattacctgatagaaaaaattataaagttgaaatgaaaaataataaaattatcttattagacaaggtagaagatccaaatctaaaaaagagaatagaaaactttaaatttttcggacaatatgcaaatcttaaagaattgaaaaactacagcaatggtgatgtctcaattaatgagaatgttccaagttatgacgtgaaatataaaatgagtaataaagatgaaaatgttaagcaattaagaagtcgttataatattcctactgataaatcaccggtattaaaaatgcatattgatggtaatttgaaaggaagttccgttggagataggaagttagaaattgatttttcgaaacgtgaaaatagccatttatcagtaatagattctttggattaccagccagcgaaggtggatgaagatgaaagataaatacaaaatagatccagggattattaaaaataatacagaggaaactacagctatttctaaaatcagctacgaagttgaaaatgcgaatttatatggagctgatagtgaagatataacaagacaaatagaatatttgaaagccaaaaaaaaattcccttctaatcttgaatatgttgatagttacactgattctcttaatggagtaacaacttctgcttttttaaataaagatacaggcaaagtaactcttgggatgactgggactaatatacaaggcgaagcctttaaaaagttaaaagaaggtgaattttcaagacaaaatgttaccaatgctttggaaacagttaaagatggatatgcagatcttaaaatattatattctcctgcatctgatcaaaactatagatatgcgaatacacaagaatttataaataaaataaaaagtaagtatgacattgattttattactggtcattcactaggtggaagagatgcggtagttcttggaatgagtaatggtattccgaacattgtggtttataatccagctcctatttctataaatagtttgaatcctaattccccagatggaaaacgattgttagagttatataaaaattataaaggtaatattactaggtttgttgcagaaaatgatgcattgacagaaaatctgaagaaatataagcattatgtttttttcggtaatgataaagtctttaaaaatggtaaaggtcatgaaatggaaggctttctgaccgaagaagaacaaaaagctataaaaaaagaacttaaaaaactacaaggttatgcagaagaaaataataagtcatttgtaaagaattcaaataatgctatctctaaattagctagtatagaattacttagagcaaatatgatgactacaaatggaggaggattatcttcttcgcagcaaaaagttttagaaagtttaacagctttaacaattgcgcagtcattcagtcaactgatagacgatgaaattaatcaaatcaaaaaaatgtataatgaaaagaaaaaggaatttggaaaaaattgggaagacgctcaaaaagctggaaaagctgtaggtgaagatttgagtgtaaatggagttctcaatgctttagatgaaggtcaagtgaatgaaagtagtatggtaagagaacctgaacaaatgatatctgcaaaagaaagacaactttcaacgatagggtcttctgtatcaaattatattatgagagttagactcagtattaatgaaatcgttgataaagatcaagtgcttgcatcacaaataggtggattactatgatgtttaatcaaattaataataaaaatgaattagaagaatcatatgaatctgagaaaaaacgtatagagaatgaactgcataatttaaatgaacttaggcatagaactcgaaaagaaaatgaacgtagttatgatgtttttcaatatttgaagcacgaaatgaattatagtgaagatgcccaaaggaaaatgacgagaaatatagaagcgtatgagcaagaaatcaatgagataattagaaagcaagaatggaaattagaagaatataaagaagacttaaaaaagtcttatgaaaagcagttagataaactaagtgactgataatttggaggagattaaatgactctaatagaaccagatatgaacttaagaatgccagatataagtactacagtagaaacacttaatctcatatctaaaatggaagcgcaaaaagaaaacattcgttcagttattgcacctgaacataagcataaatataaagatattgaaaacggattaaaaggtgaagaaaaagtattgattgaacaaatggcgcagcattgcgaagcttttaaagctaattttaaaggtgcagctcaaggagactgggttaaaagtgcaatgtctgagatagacagtattaaagatgatttgaaaaaaattaatagctaaactacatatcatactactaaataaagcgaccaatgttcagtatattcacaactgacactaggccgcttctttttaatttattttatttccatgtaaagtaacgctctcttaatcgaaataccacactcacaattgtaaaaacacaacttaaattactgtcccgcattaaacatatctacattccaaacagcaacaacaaaatcctcaagtaccaaaagctatgaccactttatcaaaatcaacgcaagttaacctctcccgaactacccgctatagatcatcatcaccttacaaaccataaagcgctgcagttaagtattgaatagcatagccaattgaaatgaaaatagcaatcgttataatggcactaccaattgtatataaagtatgtttcgtagataaaccttccgtcttagaaccaaaaacacttagtagaataaatgcaatgccaatgacatataaaactaaaatgacaaataacatgtttatacacctcgattctctttagtgagatatatctttgtctccattataaagtaaagtgctcaataatttaattaagtatactatttttttattatcgaagattgcgaaagaggaaacgctcctatataatgtaaaacggaattattcctatttacaaataaattgaagtgagggtatatatatggctaaaattccagttacggtattaagtggttatttaggctcggggaaaacaacattgttaaatcatattttacaaaatcgtgaaggtcgacgtatcgcggtaattgtaaatgatatgagtgaagttaatatcgataaagatcttgtcgcagatggtgggggactatcgcgtacagatgaaaaattagtcgaactctctaatggttgtatctgttgtacacttagagatgatttattaaaagaagttgagcgtttagtgaaaaaaggtggcatcgatcaaattgttattgagtcaacagggatttcagagccagtacctgttgcacaaactttctcatatattgatgatgaacttggcattgatcttacagcgatttgccgtttagatacaatggttacagttgttgatgctaaccgcttcgtacatgacatcaactcagaagatttattgatggatcgtgatcaaagcgttgatgaaacagatgaacgttcgattgctgatttattaattgaccaagttgaattttgtgatgtattgattattaataaaattgatttaattagtgaagaagaacttgcaaagttagaaaaagtgttaagcgcattgcaacctattgctaaaattattaagacaacaaattctgaagtagatttaaaagaagtcttaaatacgcagcgttttgattttgaaaaagcgagcgagtcagcaggatggatcaaagaacttgagtcgggtggtcatgcatcgcatacgcctgaaacagaagaatatggcatatcatcatttgtatataaacgtcgtctacctttccatgctaaaaggttcaatgattggttagaaagcatgtcaaataatgtcgttcgatcaaaaggtatcgtatggttagcacaatacaatcatgtagcatgtttattatctcaagcagggtcatcttgcaatattcacccagttacatattgggtggctagtatgtctgaagcgcaacaaacacaaatattagcagaacgtcaagatgtcgcagctgaatgggatccagaatatggcgatcgtcatacacaatttgtcattattggtacagaattagatgaagaaaaattaacaaaagaactcgatgcatgcttagtcaatgcgcaagaaattgatgcagattggcaacaatttgaagatccatatcaatggcaaattagaccagcacgataagttgaatgaagtataatcatttttgaattgtggcttaattgtttgcaatttatgacaattaataaaaagttaagatgttcttaggaactttttgttttcaatctatctaaagtgtgatagttttgataaagcagaaatttgcattttatccatagggctaggacatgtatgtgtcttagtcctttttatatttgcgttgatgaaaaatgataaaaccatcgtaccaactgttaattgaaagtacaattattgtttaacggtcataaaaatgagtgaagtaattgcagctatcaatgtactattactgcttacagtcacacgagtgtttcagactaaacgtgcaacgaaattctgcacgcggccaatatatcttgcgccagatcaagaagatcattaagatttcgcacgccaaatcatgaatgtcttagacttcgagtatcaaacataaaacacgccacaaaaatataacgcgtcagactacaaagatcacgaatattccttacgtaccaccaagaacatcctatacaaaaaataccaagaccatttatttgcaacaaacaaacaagactcacctcacatcaataaatcaacacaaagcaaagccaccatccctattggtatagtggcctgagaattttaagtattcaattcgcttaaattattttgcgaaaatgtcgataattgctttgatgattttaatgatagtacctacaatagccatcgttttgtcctcctgtatgttgatttaacatagtgatgagttgttgattgttaatgtttgagattagttgttacctaaaaatttaccaagtaaatctttaaagaatttgaataattttgctacgaattccatgtgaatggcccccttcaaataagatgttcatatctatgagatttttataacttacttaccagtgaatttctcaattaatcctttaatgaatttaatgattcctgcaatgatacccatgtgaaagacctcctttgtttgttatgaaatcttatttaccagtgaattgttcgattaagcttttgataactttaatgatgccagcgatgatacccattaagattacctcctttgcttatgagttaacttcattgtacatagttatcttgtgcgtaattgatttttttcctaacttgaattgttatgatcataactgcgaattttttattttaaaaggacgggaaatactgcctaactgtacaggtgcgtttacaaaatctttacaatcattggtttaatagaggttaagctcatgaatttgacatgaagcagaaatttaattatattttatgttataagtttaaaacgaataacacgttaggtctcgtctaggcaaagcatatttatgaagatgaattgaacagacagaagtaacattttatatacatatgtgcatgggagcacgcttaaagagaacactgcaacaaggtatatcaacgtaccgtgatgcagtgtctagttaaactgaaacctgcaatagtaaattttctgccattatgtacagaatctactattgtaggtttttatttttatacataagcaattatgcgagagattagaaataaggaggttatgcagtgttaagttttcaattgctattttcactgtttgttattgcgcttatcattgcattgataagtggcttgttgtttttagcaccagttatgccaatgagatatattaaattacatttatacatactagtcatgccagtattatttgcagtcattggctttttcggtattcatggtcaacatgtcttaggtccatttaaaatagatcgtttatcttggttattagctggctttgtaatggcgcttggttttattattcaaaagttttcaatgcgatatttactaggtgatcatcattatagacattactttccattgttcactgcgattacgtcgtttgcatctttagcatggatgtctgaagacttaagactgatggcactctgctggggtatgacattattatgtttaacactgctgatgaacgttaatcgtttttggaaagtgccacgtgagtctgcgaaattatcaagcatgacatttttatgtggttggcttgcattcgttggagcaattgtaactatttatattgcgactggtgagtggcgggtaccacaacatatagtacatccgacatggtcattgttgacgaatgtactacttgtattagctgtcatgataccggcagcacaatttccttttcatcgatggttgattgaatctgtaacggcaccaacgccagtatcggcaattatgcatgcaggaattgtgaatgcaggtggtgttattctaactcgttttgcgccgatatttgataatggatttgcgttatcattattacttatcctttctagtatttctgtattgttaggatcgggtattagcttggttcaagttgactacaaaagacagttagtgggctctacgatgagtcaaatgggctttatgttagttcaatgtgcattgggtgtatattcagcagcgattattcatttaatattgcacggtatttttaaagcaacattatttttacaatcaggttctatcgtgaagcgattcaatattccaaaacaagcatctgctaaagacgcttatggctggattgtcatgggacgtgtattagctattatcgtggcatttctattttggatgagtagtgacagaagtgcatatgaagtgttaagtgcactcattctagcatggtcattacttgtatcttggaatcagatggtagcctttagtaaagggcgcatggcacgtctggttggcatgattttgattgcaattgtgacatttatctacgtcatcacacacaattatttttacgatgtattacaaaatataacaacacatgcgacaacaccgcctacagtgagtgtcatcattagtgttgtcattttaatctttggcagtttattaagtatttgggtggcgcgtcatcgatactctaagggttttgcggtattgtacgtgtggttagttaatctaggtgaagcacgctcgaaagcgatagaaagtcatccgaattatttgaagaagtatttataggaggtgaaaggtatgacaacacagttaaatatcaattcagtcattgaaaatgcgaaacgtgttattacaccattatcaccgatttcgatttttgcagcacgtaacccctgggaaggattagaagcggatacgtttgaagatgtcgcaaaatggttacgtgacgttcgcgatgtggatattttcccaaataaagcattaatagaaagcgctgtggcacgtggtgaattagatgaaagtgtctttaatcaacttgttactgatatgttacttgaacatcactacaatatcccgcaacactacatcaatctttatattgataacattaaaacattaaaagacgtacctgcatcatatatgaatcattcaaatgttgatgttgttgctgatctactattagaaaaatcaaaacgtgatatggctgaatcatatcatcactatgatgtacgtccgatgagtgatgcaataatagatgaacaaggtgagccacttagcgaacaagtgaatcgtcaaatgattaaatggacgaaactttatatcgatcaatttctatcgagttggacaatgccgaagcgtgagcaaagtttttaccatgcatggttgcatttagcgcaacatgaccatagttttactaaagcacagcgccaagtgattaaaggcttacccaatgatcctgaaatgacgatagagtcagtattaacttatttttcaatagatcaggaagactaccaagcttatgttgaaggacatcttttggcgttaccgggttgggcaggtatgttgtattaccgttcacaacagcatcactttgaacaacatttgttaacggattatttggcaattcggttagttgtcgaacaattgctagttggtgatgagtttaagtcagtcactaaagattgtgaaagtagatcggaaaattggtttaagcaaactgttgcatcattgtgttactacagtgatatgcctagcgatgtattactacaacatgacgtcaatgaaattcaaacgtttattcattttgcagcaactatgaataaaaatgtatttaaaaatttatggctaattgcctgggaaatgacatacgaatctcagttaaaacaaaaaattaaagcaggtcatgaaagtgtggcgggcgcattagatgtaaaccaagtaaatgtctcagaaaatgataacgctaatcagccacattcagtattgttaaatgacacacaagcagttgatgaaaataatagcgagctaaatcaggtgggcacatcaacgaaagcgcaaattgcattttgtatagatgttcgttcagaaccatttcgtagacatatcgaagcagcagggccctttgaaacgattggtattgcaggtttctttggattacctattcaaaaagatgccgtagacgaacaattcaaacatgattcattacctgtcatggtaccgccggcatatcgcattaaagaatttgcagaccgctacgatatgaatgtttatcgacaacagcaacagacaatgtcatcgatgttttacacatttaaattgatgaaaaataatgttatgcctagtctgttattgcctgaattaagtgggccatttttaagcttgagtaccattgtcaattcgattatgcctagaaaaagtcgcgcgtctttacaaaaaataaaacaaaaatggttgaaaaagcctgaaacaaagttaacgattgatcgtgagtttgaccgaacatcagacttacctgttggatttactgagcaagagcaaattgatttcgcgttacaagcgttgaaattgatggatttaaccgaagcatttgcgccgttcgttgtgttagcaggtcatgctagtcattctcacaataatccacatcatgcatcacttgaatgtggggcttgtggtggcgcatcaagcggttttaatgctaagttattagcgatgatatgtaatcgtccaaatgtcagacaaggattaaaacaatcaggtgtgtatattccagagacaactgtttttgcggcagcagaacatcatacgtctactgatacgttggcatgggtatatgtgccagacacattatcagctttagctctagatgcatatgaatcattgaatgacgcgatgccgatgatttctgaacaagcgaatcgcgaacgtttggacaaactgccaacgattggtcgtgtgaatcatccagtggaagaagcacagcggtttgcaagtgattggagtgaggtacgtccagaatggggcttggctaaaaatgcatcatttataattggacgacgccaattaacaaaaggcattgatttagaagggcggacatttttacacaattatgattggcgtaaagataaagatggcaaattgttaaataccatcatttctggtccggcgcttgtggcacaatggattaatttacaatattatgcgtcgacagttgcgccgcatttttacggaagtgggaataaagcgacacaaaccgtcacgtcaggtgttggtgtcatgcaaggtaatgcgagtgatctgatgtatggcttatcatggcaatctgttatggctgctgatcggacgatgtatcattcgccaattcgtttacttgtcgttattcaggcacccgactatgttgtagctagactattcgcgaataatgagcatttcgctaggaaggtgtctaatcattggctgcgtttaatgagcgttaatgaggaagggcgttttaaaagttggatttaacgatgatatgttgcgatgctaagtaattaatatatcatcatatctacaatgttctagcttcttaaaatatactaaaaatgataaacttaatgtaatagttgatgtcgtgataacgatacaaagatgaagtaatcaattttaatattattggagttagtgatatgaaaagaacgaaaggtgaaatcgaagctgaaatcagtaaagccattacgcaatgggaaaaagatttccttggcagaggttccttgtcagttaaatcagacattttaagagatatggtgattattagtttacaaggtatcttaacgccagcagaatatcgtgtgtgtagtacgaatgaaggattactaaatattaaacgaacacgttctgaattagttgaatccggtgagcaagatttgaatgatatcattcttaaaattacaggtatcaaagtgatgagcttccacagtgatttaagtacagttacaggtgaacgtattatcgtattcaaacttgaggataatttggaaaagcatatttaagaaggttaggtatgcttctgctggcttattaaagctatagaagtatgcttggttaaacagcgcaacgccatatatttgggtgtgctgtttttctattacatgatgtgtttattacgtggatgaatgcgtgggtctgaatatagcccgtgaaaggcgtatgtcataaaatttgcgaatggtgacaagtcaacgcaagcatatttgttgcgagacatgcccactatccttttacataaagagtatatgtgtgacgtaggcatataatcgataaagtatacctaaaaaattaggtataatgaccattgttgcaataagtttttcggccttgaaaccgataacgcatagtataataggaataaaatataatacaaatatccagtaaatcaaatttgaaaacgatggatgaataggggtaaagaatctaactaatgtaatgattaacgctatatagacaaaaataactctattgatacgccttaccccctctgtataataaatatagatcgtactaaattgaaaatagcaaaatattgttatttcaattatacaatgttttatttgcaatatacataacaatatgaactttataattttgatattgtcggtaaagtgaaatttgtggcacattgatattatggataacatttgtaaaatgaaaatgatgatacgaggagattgtaagatgatagataaaaaattaacatcaccgaaaatgacagtgcctttatttttaatcgcgctgattgtatttataggtatgttttacggtgtagtgacaaatcaagaatggcttaaaaatatagatatgggatcattaacatggtttacagattatttcggtgagccacaacgtcagtatgttaacaatttgtttaattattatatgacgtttagtgcggaaattggagatgtcaaaggtgtcgtgttgatttcaattatcgtcacaatcatactgtttattaaacagaggcatttagcggtttggtttgtgacatatttggtttcaggtgtcatcatgaacaaattaattaaagatactgttttacgtccaagaccatataatcatttagccgttgatacaggcttttcatttccaagtggacattccaacgccagcacattattatatttcgccttaatgatcattattatttcagttgctgctaagacaataacaaaagtgttgagtgcgctagttatgggaatattatggcttagcatattattttgtcgcctttattttcatgcacattacttttcagatgtcattggcggcacgtcactagcaatcatttgggtagcgttattcttaatggtatacccatactttattaatcatcgacgacaacgcgtttagcaaacatctttagacatagtggaggtatatagaaaaatgagaattaaaacaccgagtccatcttatttaaaaggcacaaatggacatgcgatattattattacattcatttacaggtacaaatcgggatgtgaagcatcttgcagctgagttaaatgaccaaggatttagttgttatgcaccgaattatccaggtcatggtttactgttgaaagatttcatgacatataatgtagatgattggtgggaagaagttgagaaagcttaccaatttttagtcaatgaaggttatgaatctatcagtgcaacgggtgtgtctttaggtggattaatgacattaaaattggcgcagcactacccgttgaaacgtatcgctgtcatgtcagcaccaaaggaaaaaagtgatgatggcttaatagaacatttagtttattatagtcaacgcatgtcgaatattttaaatttagatcagcaagcatcgagtgcgcaattagcagcaattgatgattatgaaggtgaaattacgaagtttcagcattttattgatgatatcatgacaaatttaaatgttattaaaattccagctaatatattatttggtggtaaagatgagccatcctatgaaacaagtgcacattttatttatgaacatttaggatcagtagacaaagaattaaatggtctgaaggattcgcatcatttaatgacacatggagaaggcagagatattttagaagaaaatgttattcgctttttcaatgctttaacataattgaagattttaaatattaacacttgagtgacgatgttattatatttgtcatttgagtgttttttgtggcgtgatagtatagggaacttagacaaagttaatttgtagtgtgatgtcgtggaaatattatgggcattgtacctgaagttgttatgtggcgagatattggcgcacgtatacagcgttgaaccagaaattttaatgtagcgtaatgacaacacattacaagagttgactatattatgataaatacaggcgctaccgtattaatgaaacaattttgatgcaggtgtattgcatgttatttacatacatgttagagtgttacttaaacacgtagacgctttaacgctttaaaggagatgtgaatgatgaaaagacaacaatcacaatggaagtcatcaactggatttattttagctagtgcgggttctgcaatcggtcttggtgccatgtggaaattcccatatatggcagggatttatggcggcggtgcctttctagctatgttcttaatattcaccatttttgttgggttgccattactcattatggaattcactgttgggaaaatgggacggacatatacaacacaaatatatagtaaattaactggtaaaaaatggctcaatatcattggctggaacggtaatttggccgtgtttattttatttggcttctatagtgttatcggtggttggattgtcatttacatcggacaagtattatggcaattagttatatttcaacgcatcaatcatctccaagaaatgaattttgaagcggtaatatcaaatccttggttaactgttctagggcaaggtatattcatattcgctacgatgattattgtcatgttaggtgttgaaaaaggattagaaaaggcatcgaaagttatgatgccattgctgtttgtctttttaatcatcattgtgattaagtctttaacattagatggtgccttagaaggtgtgaaatttattttacaaccaagagtatcagagattactgctgatggcatcttgtttgcgctaggtcaatcattctttacgttatcattaggaactacaggtatgattacttatgcgagttatgcctctaaagacatgacgattaagtcatcagctatttctatcgttgttatgaatatctttgtatctgtattggcaggcctagctatatttccggcgttacatagttttggctatgaaccacaagaagggcctggattattatttaaagtactgccaatggtctttagtcaaatgcatctaggcacattattctatttgggattcttagtgctgttcttatttgcggctttaacgtcatctatttctttattagaattaaatgtttctaacttcacgaagaatgacaatacaaaacgtaaaaaagtcgcagtgatcggtagtattttagtatttatcattagtattccagcaaccttatcttttggtatcttaaaagatgtaagattcggtgcgggaacgatttttgataatatggatttcatcgtttcgaatgtattgatgccattaggcgcattaggtactactcttgtcataggacaattattagataaaaaattattacaacaatattttggtaaagatcgatttagattattcaatggttggtattacttaattaagtatgcgatgcctgtcgttattattttagtctttatcgtgcaattatttagttaatatatagaagcatctgacacacaagtatttgtgttgctcaggtgtttttttgtttggaattgaaaagttagtactggttctgaattaatcgaaacttagataattgcaaaataacaaaatgtcgtttataattcttatctgaaaagtaagaattaaaattgagacatgaagaaaggtttcattcatttgatcggcatgtcagatgagggtgcatctatgattacttatgatttaattggcaatacaccattagtactgttagaacattatagtgatgataaagttaaaatttatgccaagcttgaacaatggaatcctggaggcagtgttaaagacagactcgggaaatatttagtagagaaggcaattcaagaagggcgtgtgcgtgcaggtcaaactattgttgaagcgactgctggtaatacaggcatagggttagctattgcagcgaatagacatcatttgaaatgtaagatctttgcgccgtatggtttttcagaagaaaagattaatattatgatagcgcttggtgcagatgtttcaaggacgagtcagtctgaaggtatgcatggggcacaattagctgcacgttcctatgctgaaaaatatggtgccgtttatatgaatcaatttgaatccgaacataatccggatacatattttcatacattgggacccgaattgacttcagcattacagcaaattgattattttgtggctggtattggctctggcggtacatttacaggtaccgcacgttatttaaagcaacatcacgtgcaatgttatgccgttgagccagaagggtccgtgttaaatggagggccagctcatgcacatgacactgaaggtatcggttctgagaaatggccgatatttttagagagacgtcttgtagatgggatatttacgattaaagatcaagatgcctttcgaaatgtcaaaagtttggctataaatgaagggttgttagtaggcagttcttcaggtgcagcattacaaggtgcattgaatttaaaagcgcaattatctgaaggtacgattgttgtcgtatttccagatggtagcgatcgatatatgtctaagcaaatatttaattatgaggagaatgattatgaataagaaaactaaattaattcacggtggacacacaacggacgactatacaggtgcagttactacaccaatttatcaaacaagtacatatttacaagatgatattggtgatttacgtcaaggatatgaatattctcgtactgcgaatccaacaagaagttctgtagaaagcgttattgcggcattagaaaatggcaaacatggctttgcgtttagttcaggtgttgcagctatcagtgcagttgttatgctgttggacaaaggtgatcatattattttaaattcagatgtatacggcggtacttatcgcgcattgacaaaagtatttacacgatttggcattgaagtggattttgtagatacaacgcatacagattcaattgtacaagcgatacgcccaacaacaaagatgttgtttattgaaacaccttctaatccattattacgtgttactgacattaaaaagtctgctgaaattgcgaaagaacacggtttgatttcagtcgttgataacacatttatgacaccttattatcagaatccattagatttaggcatcgatattgtcttgcattctgcaacgaaatatttaggtggacatagtgatgtcgttgctggtttagttgcaacatcggatgacaagcttgcagaacgtttagcatttatttcaaattcaacaggtggcattttaggacctcaagatagctatttacttgtgaggggtattaaaacattaggtttacgtatggaacaaattaatcgcagtgttattgaaattattaaaatgttacaagcacatccagctgtgcaacaagtgttccatccaagtattgaaagtcatttaaatcatgatgtccatatggctcaagcggatggccatacaggtgtgattgcatttgaagtgaaaaatacagaaagtgccaaacaattgattaaagcaacatcgtattacacattagctgaaagtttaggtgcagtggaaagtttaatttcagtacctgcattgatgacacatgcatccattccagcagatattcgagctaaagaaggtattacagacggacttgtaagaatttctgtaggtattgaagatactgaagatttagtcgatgatttaaaacaagcactagatacgctataaataatagcagcactagcatatattttaagatcaacttaaattgattttgaaaatgctagtgcttttttgtgcgatgttaatcattcgtgattgagttatggaggtttggtggacatttgtatggatttaatttgataaatgtcatagtagtctcacaattcatcattgtcacatgaattaattatttttttaattttttagaaaattcggcaaattgtattgacgatatatgcaattttacatataatgctcttattcctagtggattaataagaatttgtaggaggggcgatgatgattgagtttcgacaagttagtaaatcatttcataagaaaaagcaaacaatagatgctttgaaggacgtatcatttacggtcaatcgcaatgatatttttggtgtgattggatatagtggtgcaggaaaaagtacgttggtaagactcgtgaatcatcttgaagctgcctcgaatggacaagtgattgtagatggacatgatattacgaattatagcgaaaaaggcatgcgagaaattaagaaagatatcggtatgatatttcagcatttcaatttattaaattcagctacggtatttaaaaatgtagcaatgccactcattttaagtaagaaaagcaaaacagaaattaagcaacgagtaacggaaatgcttgaatttgtaggattgagtgataaaaaagaccaatttcctgatgaattatctggtgggcagaagcaaagggtggctattgcaagagcgcttgttactaatccgaaaatactcctatgcgatgaagcaacaagcgcattggatccagcaacgactgcttcgatattgacgttattaaagaatgtcaatcaaacctttggcattacaattatgatgattacacatgaaatgcgcgttattaaagacatttgtaatcgtgttgctgtaatggaaaaggggcaagtggttgaaacaggaactgttaaagaggtgtttagtcatcctaaaacgacgattgctcaaaattttgtgtctacagttatacagactgagccaagtacatcattgattcgtcgattgaatgacgaacaagttggcggttttaaagattataaaatcttcgtcgaggaaactcaggtgacacaaccgattataaatgacttgattcaaatttgtggcagagaggttaaaattttattttcatctatgtcagaaatacaaggtaacaccgtatgttatatgtggcttcgatttaatatagatcaacaatttgatgacacggcaataaatcaatatttcaaagagaaaaatattcaatttgaggaggtgcattaacatatgtttggttctgatttagacagtgcacagttattacaagcattgtacgaaacgttatatatggtatctattgctttatttttaggagcagtgattggtattccattaggtgtcttattggtaattactcgaaaacaaggcatatggcccaatatagtgatacatcaagttttaaatcctttaatcaatattttaaggtcactaccatttattattttgttaattgcgattgtgccattcacaaaattagtagtaggtacttcaattggtacgactgctgccatcgtgcctttaactgtatatgtggcaccttacattgcaagacttgttgaaaactcattattggaagtagacgaggggattattgaagcggcgaaagcgatgggcgcttcaccactacaaatcattagatattttttaattcctgaagcgttaggttcattagtattagcaattaccactgcgattattggacttattggaagtacggcgatggcaggagctgttggcggtggtggtataggagacttagctttagtgtatggttatcaaagatttgatacgacggtcattattattaccgttattgtattagtcattattgtccaagtgattcaaacgctagggaatgtcctagctagattcatacgtagacattaatgatatatagtgaagattttgaaaggaattgatagaatgaaaagattgattgggttagttatcgtagcacttgtattattagcagcgtgtggtagtaacaatgataaaaaagtaacaattggtgtcgcatcaaatgacactaaggcttgggagaaggttaaagaattagctaaaaaagatgatattgatgtggagattaagcacttctccgattacaatttaccgaataaagcattaaacgatggtgatattgatatgaatgcattccaacattttgcatttttagatcagtataagaaggcacataaaggaacaaagatttcagcattgagtacaacagttttagcaccgttgggcatttactcagataaaattaaagatgtcaaaaaggttaaagatggtgctaaagttgtcattccaaatgatgtatcaaaccaagcacgtgcacttaaactattagaagcagctggtttaataaaactgaaaaaagatttcggattagcaggtacagtgaaagatataacgtcaaatccaaaacatttaaaaattactgcagtagatgcacaacaaactgcgcgtgctttatctgatgtcgatattgcagttattaataatggtgtagcaactaaagcgggtaaagatcctaaaaatgatccgatatttttagaaaaatcaaattcagatgctgtaaagccatatattaatattgttgcagttaatgacaaagacttggataacaaaacatatgctaaaatcgtagaattgtatcattcaaaagaagctcaaaaagcgttgcaggaagatgtcaaagatggagagaaacctgttaatttatctaaagatgagattaaggcaatagaaacgtcattagcaaaataaattatattgcgtcctacaagcaaagttcatgcttatgtttgtagggcgttattgtttgacaataaaattatttccaatagagaaagggaatgtaatcattttatagtgaaatattatgaaattgtaataatttagatattgtaaaatctaataagttgtaataattttaaggggtaattataaaatttgatgatacagtatatgatttttttgtaatcataatgtcatcaaacatcaacctattatacataataaaatcgtataatgatgtagtattcataaattcggataaaagaatgttaggaaagttaagcaagaggaggattttaaagtgcaaaaaaaagtaattgcagctattattgggacaagcgcgattagcgctgttgcggcaactcaagcaaatgcggctacaactcacacagtaaaaccgggtgaatcagtgtgggcaatttcaaataagtatgggatttcgattgctaaattaaagtcattaaacaatttaacatctaatctaattttcccaaaccaagtactaaaagtatctggctcaagtaattctacgagtaatagtagccgtccatcaacgaactcaggtggcggatcatactacacagtacaagcaggcgactcattatcattaatcgcatcaaaatatggtacaacttaccaaaacattatgcgacttaatggtttaaataatttctttatttatccaggtcaaaaattaaaagtatcaggtactgctagctcaagtaacgctgcgagcaatagtagccgtccatcaacgaactcaggcggtggatcatactacacagtacaagcaggtgactcattgtcattaatcgcatcaaaatatggtacaacttatcaaaaaattatgagcttaaatggcttaaataatttctttatttatccgggtcaaaaattgaaagtaactggtaatgcatctacgaactcaggatctgcaacaactacgaatagaggttacaatacaccagtattcagtcaccaaaacttatatacatggggtcaatgtacatatcatgtatttaatcgtcgtgctgaaattggtaaaggtattagtacttattggtggaatgctaataactgggataacgcagcggcagcagatggttacactatcgacaatagacctactgtaggttctatcgctcaaacagatgtaggttattatggtcatgttatgtttgtagaacgtgtaaataacgatggtagtattttagtttcagaaatgaactattcagctgcaccaggtattttaacttacagaacggtaccagcttaccaagtaaataattatagatatattcactaaagtcttacgtatataaatatataatgaattcctattacatttcacaagctgaaaagttggattgaatcctaaactttatggcggggctatcaaagtcgtgattgttgtaataggaatttttgtataagaaaaaggattggtcgaatgaacttcatgttctatgttcgaccaatccttttctgaattagtattcatgctttactttgcgaatgcttgtaaataatctagcaccgtttgttattaaagtaacaactgccactgcttttttgaacttacgtggtgacttaattgaaatgtaaaagtctaacacggttcctacagtgcttaaacctaatgaaagatatactaattttttatttttagcatgatatttatagccattgtagccgtcgactatgaaacctgcgacatttagtaaacttgataaacgttgtgatttggaacgttttgccataataataattccccctagtatcttctgtttatatgaaaagttgggtgcgctgaattgctaacgttttgcgctataactactcatatatgataacataattgtacagtataatttgaaaaattgatttcacaaagttggggtgtcaaagatgattaaatgtgtctgtttagttgaagaaacagctgataaaatattgcttgttcaagtaaggaatcgcgaaaagtattatttcccaggtggtaaaatagaagaaggagaatcacaagtacacgcgctgttaagagaagtaaaagaagaattaaatttaacattaacaatggatgaaattgaatatatcgggacaattgtaggtcctgcatatccacaacaggatatgttaactgagttaaatggatttcgcgcattaaccaaaatcgattgggaaaacgtaactatcaataatgaaattacggatatacgctggattgataaagataatgatgcgttgattgcgcctgctgtcaaagtttggattgaaacgtatggtggtaaacatgacaaataatgacaccatcatgttacgacattatgtcccacaagattattcgatgttagaagcttttcaattaagtgaaagtgatttgaagtttgttaaaacgccagaggaaaatattacagctgcaatgtctgataatgaaaggtatcccatcgttgtaatggatggcaggcaatgtgtggccttttttacattacatcgtggaaaaggggtcgcaccatttagcgataaccaagatgcagtatttttcaggtcatttagtgttgatcaacgttatcgtaatagaggaataggtaaagtggtaatggaaaaattggcgtcatttatcacttcaacatttcaggatattaatgagattgtgttaacggttaatactgacaatccacatgccatggcactttatcgccaacaaggatatcaatatatgggagatagtatgttcatcggaagacctgttcatattatggcgttaactataaaataaattaaatttaaaagcatctttactcatcgtcgaccacaacaattaatgatgaataaaggtgctttttgttatagatcaccggacaatttaatatagtaaaaagcgacctagtgaacaattgacatatatccacaggtcgcttaacttaagttatattgctagttgcgattaattgatagactcatcatttttgcgctgtcgagatggtctttttattaaaaatgccgtaatccaagccgtaatcggaatactgattgcaacggcaataccgcctaaaataatagaaataaattcttgggcaaatattttcgagtttataatatgaccaaatgaatatttaagtttgaaaaaccaaataaataaagcaagttggccaccaaaaaaggcaaggtaaatcgtgttcgcagatgtcgctaaaatttctctaccaacacgcatgccagattggaataattcgtattgcgtaagtgttggatttacttgatgcaattcataaatgggtgaactaatggtaatcgttaaatctatcacagctgcaataacagcaagaataatagtgaacaccataaattgaaccatatcaatgccaatattcattgaatacacatatgtttcatcttgttgttcggttgaaaagccttgtagatgaccgaagtagacagataaataaatgagtgtaatcaacaatattgttgtaacgatagtgctgataaatgcagcttgtgttttaacattgtaactattgagtacgaataaattacaagcgccaataataatgcagaaaaagaatgtgacgacataaatcggtacgccaaaaataatcaatacaatactaataattaaaatagcgaaatttaaaaatagggttaaataagagatgaatccctttttacctccgaaaattatcatcagaaagaggagcaataacgccaatataaatacagcattcattgtttcgccctccttaatgtttcaaatatttccataaacaatattgtgataggaattgtaagtacgatacctataccgcctgttagtgcgcgcgcaatttctaacgaccaattcatcgaaatagtataagtcacagtatttgcattttttaaaaagattaaaaacataggtagtgcaccggacaaatatgagaataataagatgttagtcattgttcccataatatcttggccgatgtttcgcccagcaagcgcccatctcctcattgaaatgtgtggcgtacgctgtaaaatttcatgcataccactagcaattgtaattgcaacatccataatagcgccaagtgaacctattaacactgaggctaggaagatatctttcggtggtaatgataaaaagttcatcgtttcatatttaatgcctttaccatctgtcatatatatgattaattctgttaaacctatactcaaaaaagttccgataattgtactggctatggtaatgagtgtacgcatatgccagcctgtaacgagcaataaagtgagtattgttgaacagatcatggcaatggtcatgagtaagaataaattaatattgctatgttgaatatgaatgtaaattgcgattaatatggcaatagaattcaagattaacgataaaatcgattgcagtccgactttgcgaccaaccaataatacagttaataagaacaaaccagtgatgataaccgttaaggtatcacgcttcttttctataatataagcatcactcggcttgttagaaatatgtaataatactttttcgtgtgtgcgaaatgcctcagaatctgcttgcgatttgacgtactgatgattaatcgtcgtcgtttctccagcaaattgaccatttaatattttgacttttaattgatttttatatttaatatcacgattattttgtgcatcttttgtaggtgtcgaagaaacatgtttgacatctataatttgaccaattggtttgttgtaaaagttctcattattgaatgtaaataaaatagcaccaatgaatgcgatgcagaacaaacctaaaattatattaaatggctttgtaaataaatttctatatttcaaaaacaaaaccccaattctatgaatgaattaatatggtgattatacgcccttaattttttattttcaaagatattactgctaagtgtaaaacgaaaatcatcattgatagcatcgaattacttaatggaatgtagacgttttagtcattaattgctgaataagtgttaataatatgccaatatcactctttgtataaggctcctttgtaatagcacatatcgttctttttaattcagtatgatctaattttatatctatccatgatttagattctggtaaatgtatattttgtgatgaaatgatgtaaccttctttttgacgaaggagatactgcgcaagtggttggctactgattgtgtatacatctgatttagtaatcttgcgcaattgtttttttacagtttcggcaaatggtgccaagcaataaatatgactatgctcaaactgaattaatggtgggtgtgtcgccatcgtaattggatcgtctgaaggcgcatataaatgatagtgctcttcgaataaaggtagcatatgtaattgtttgtgtttacgtatttctggtgtaagttccgtgaaaccaatgtctatattcccatttaatacgctatttataatcgtgtcatgatctaataagctcggtatgacatgtgtatcattttgtaaatgaaacgtttggataagtggtagtaacatgtgggatacgtcactctcatcatagccaatgtagatacttttatttttagttaatccatggctttgaaattgttcaatcgtgctatctaaatgttcaataatacgcagagcttcattaaataataatttcccttcagatgtgagcgtaatattgcgtccttgctttttaaataaagacacattaagttcttgttctaataatgtaatttgacggcttatcgctgattgagcaatgtttagttcaagtgctgtttcggagatatgttctcttttagcgacctcgataaaatatcttaattgtttaatttccatagcgatataggcacctccgaaaatgagtgttttgtaactattatagcaatattattgataaatgttctattttttagatgaatatcttctattttatatattgaacagataaattttttagattatagtaattatcattaataactaatatcagaatattctaaaaaaggggtgtgcatcatgcacaatgagaaattaattaaaggcttatatgactatcgtgaggaacatgatgcgtgtggtattggtttttatgcgaatatggataataaaaggtctcacgacatcattgataaatcgcttgaaatgttgcgacgcttagatcacaggggcggggtcggcgcagatggcatcactggtgatggcgcaggtattatgactgaaataccttttgcatttttcaaacaacatgtaacggactttgatatcccaggtgaaggtgaatatgccgtggggttatttttttccaaagaacgcattttaggttctgaacatgaagcagtttttaaaaaatattttgaaggcgaagggttatcaattcttggttatcgtaatgtaccagttaataaagatgccattgctaaacatgtagcagatacgatgccagtcattcaacaagtgtttattgatattaggggcattgaagatgttgaaaagcgtttgtttttagcgagaaaacaattagagttctattcgactcagtgcgatttagaattgtattttacgagcttatcacgcaaaacaattgtatataaaggttggttacgatcagaccaaattaaaaaactatatacagatttatcggatgatttatatcaatcaaagctagggttagtgcattcgagatttagtacgaatacattcccgagttggaaaagggcacatcctaaccgtatgttaatgcataatggtgagattaacacgattaaaggtaatgtaaactggatgcgagcacgccaacataaattaatcgaaacattatttggcgaggatcaacataaagtgtttcaaattgtcgatgaggatggtagtgactctgctattgtagataatgcgctagagttcttatcgttagccatggagccagaaaaggcagcgatgctactcatacctgaaccttggttatacaatgaagcgaatgatgcaaatgtacgtgcgttttatgaattttatagttatttaatggaaccgtgggatggtcctacaatgatttcgttctgtaacggtgacaaacttggcgcgcttacagatagaaatggattacgtccaggtcgttatacgattactaaagataactttattgtcttttcatctgaagtgggtgttgtggacgtacctgaaagtaatgttgcttttaaaggtcaattgaatcctggaaagttattgcttgttgattttaaacagaataaagtcattgaaaataatgatttaaaaggtgcgattgctggagaattaccatataaagcgtggattgataaccataaagttgactttgattttgaaaatatacaatatcaagattcgcaatggaaagatgagacgttatttaaattacaacgtcagtttgcatacacgaaagaagagattcataagtatattcaggaacttgtagaaggtaagaaggatcctatcggtgcaatgggatatgatgcgccaattgcagtgttgaacgagcgaccagaatcactatttaattactttaaacagctgtttgcacaagttacgaatccaccaattgatgcgtatcgtgaaaaaatcgtaacgagtgaactttcttatttaggtggcgaaggtaacttactagcacctgacgaaacggttttagatcgtattcaattgaaaaggccggtattgaatgaatcacacttagcagcgattgatcaggaacattttaaattaacttatttatcaacggtatatgaaggggatttggaagatgcgttagaagcattaggccgagaagcagtgaatgctgtaaagcaaggcgctcaaattctagtgttagatgacagtggattagttgatagcaatggctttgcaatgccgatgttactcgcaataagtcatgtgcatcaattacttattaaagcagatttacgtatgtctacaagtttagtcgctaaatctggtgagacacgagaagtgcatcatgttgcttgtttactcgcatatggcgcgaatgcaattgtgccatacctagcgcaacgtacagttgaacaactgacattgacagaagggttacaaggcaccgttgtcgataatgttaagacatatacggatgtattgtcagaaggtgtcattaaagtaatggctaagatgggaatttcgacagtgcaaagttatcaaggtgcacaaatatttgaagcgattggcttgtctcatgatgtgattgatcgttattttactgggacacagtctaagttatcgggtatttcgattgatcaaattgatgctgaaaataaagcacgtcaacaaagtgatgataattatcttgcatcaggtagtacatttcaatggagacaacaaggtcaacatcatgcttttaatccggaatctattttcttattgcagcacgcatgtaaagaaaatgactatgcgcaatttaaagcatactctgaagcggtgaacaaaaatagaacagatcacattagacatttacttgaatttaaagcatgtacaccgattgacatcgaccaagttgaaccggtaagtgacattgtcaaacgctttaatacaggggcgatgagttatggatcgatttcagcggaagcacatgaaacgttagcacaagccatgaaccaattaggtggaaagagtaatagtggtgaaggtggcgaagatgcaaaacgttatgaagtacaagttgatggaagcaacaaagtaagtgcgattaaacaagttgcttctgggcgttttggtgtaactagtgattatttacaacatgccaaagaaattcaaattaaagttgcgcaaggtgcaaagcctggtgaaggtggtcaattacctggtactaaggtatatccgtggattgcaaagacaagagggtcaacgccaggtatcggtctgatttcaccaccgccacatcatgatatttattcaatagaagatttagcgcaactgatacatgatttgaaaaatgcgaataaagatgcagatatcgcggtaaaattagtttcgaaaacaggtgttggtaccattgcatctggggtggcaaaagcatttgcagataaaattgtcatcagtggttacgatggtggtacaggggcttcacctaaaacgagtattcagcatgccggtgttccttgggagattggtttagcagaaacacatcaaacattaaaactaaatgacttaagaagtcgtgttaagttagaaacagacggtaagttattaactggtaaagatgtagcgtacgcatgtgcgcttggagcggaagaatttggatttgcaactgcaccattagtggtgttgggctgtattatgatgcgtgtatgccataaagatacatgtccagtaggagttgcaactcaaaacaaagatttacgtgctttatatagaggtaaagcacatcatgttgttaattttatgcattttattgcacaagaattaagagaaattttagcatctttaggtttgaaacgtgtagaagacttagttggaagaactgatttattacaacgatcatcaacattaaaagcgaatagcaaagcggctagtattgatgttgaaaaactgttatgtcctttcgatgggccaaacacaaaagaaattcaacaaaatcataatcttgagcatggatttgatttaacaaatttatatgaagtaacgaagccatatattgctgaaggacgtcgctatacaggtagctttacagtaaataatgaacaacgtgatgtaggagttattacaggtagtgagatttcgaaacaatatggagaagcaggacttcctgaaaatacaattaatgtttatacgaatggtcatgctggtcaaagtcttgcagcatatgcaccgaaaggcttaatgattcatcatactggagatgcgaatgactatgttggtaaaggattatctggtggtacggtcattgtcaaagcaccttttgaagaacgacaaaatgaaattattgctggtaacgtctcattctatggtgcgacaggtggtaaggcatttattaacggtagtgcaggagaaagattctgtattagaaatagtggtgtagatgttgtcgttgaaggtatcggtgaccatggattagagtacatgactggtggacatgtcattaatttaggtgatgtaggtaagaacttcggtcaaggtatgagtggtggtattgcttacgttatcccgtctgatgtagaagcttttgttgaaaataatcaactagatacgctttcgtttacaaagattaaacaccaagaagaaaaagcattcattaagcaaatgctggaagaacatgtgtcacacacgaatagtacgagagcgattcatgtgttaaaacattttgatcgcattgaagatgtcgtcgttaaagttattcctaaagattatcaattaatgatgcaaaaaattcatttgcacaaatcattacatgacaatgaagatgaagcgatgttagctgcattttacgatgacagtaaaacaatcgacgctaaacataaaccagccgttgtgtattaaggaaagggggagatacgatgggtgaatttaaaggatttatgaagtatgacaaacagtacttaggtgaattatcactggtagaccgtttgaagcatcataaagcatatcaacaacgatttactaaagaagatgcctctatccaaggtgcgcgatgtatggattgtggaacgccgttttgtcaaaccggacaacagtatggtagggaaacaataggttgtccaattggaaactacattcctgaatggaacgacttagtgtatcatcaagattttaaaactgcttatgaacgcttaagcgaaacaaataactttcctgactttacagggcgtgtatgtcctgcaccatgcgaaagtgcttgtgtgatgaagattaatagagaatcgattgcgattaaaggtattgaacgcacaattattgatgaagcttttgaaaatggttgggtagcgccgaaagttccgagtcgccgtagagatgaaaaagtggcaatcgttggaagcggtccagcaggattaactgctgctgaagaacttaatctactaggatatcaagtgactatttatgaacgtgctagagaatcaggcggtttattaatgtatggtattccaaatatgaagcttgataaagatgtggttcgacgtcgtattaagttaatggaagaagcgggcattactttcattaatggtgttgaagtaggcgttgatattgataaagcaacgttagaatctgagtatgatgccattatattatgtactggtgcacaaaaaggtagagatttacctttagaaggacgcatgggtgatggtatacatttcgctatggattatttaactgaacaaacgcagctgttaaatggagaaattgatgatattacaataactgcaaaagataagaatgtcattatcattggtgctggtgatacaggggcagactgtgtagcgacagcattaagagaaaattgtaaatcgattgttcaatttaataaatatacgaaattgccagaagcaattacatttacagaaaatgcatcatggcctttagcaatgccggtgtttaaaatggactatgcgcaccaagagtacgaagctaagtttggtaaggaaccacgtgcatatggtgttcaaacaatgcgttacgatgttgacgataaaggacacatacgtggtttgtatactcaaattttagagcaaggcgaaaatggtatggtcatgaaagaaggacctgaaagattttggcctgctgaccttgtattattatcaatcggcttcgaaggtacagaaccaacagtaccgaatgcttttaacattaaaacggatagaaatcgaatcgtggcggatgatacaaactatcaaactaataatgaaaaggtatttgctgctggagatgctagacgtggtcaaagtttagttgtatgggcaattaaagaaggtagaggcgtagcgaaagcagtagatcagtatttagcgagtaaagtttgtgtataatctttgtatggaaatggtggttacgttgacgttgtgtcatgctgaatcgagtttgaaataatctagtatctatcaacgtcacatgccatctttgtaacctaaaaacaaaggtttgtaagacaacaaatcgattaattataagtagtgattttttacattcgtttataggtcaactgtagtggaagacaatgatttgtggtaatcatgtaatgcttaaaaacaatattgacttttacagaacgttcatatatgataaatattgtgtttaggaggaatacccaagtccggctgaagggatcggtcttgaaaaccgacaggggcttaacggctcgcgggggttcgaatccctcttcctccgccatcaatatttatattaaatactatatataatgaaggtaagtgctcaaattttgagtatttgccttttttatttgtctttgaatggctcgtttttttagctatagaaatgatagggcattgagattggaagggcatttggcttgtgcaatatacatagctaaatgtcttttttgttttgtgaaatatgatggatggcttgtgtgggcaagtttgctatttatagatatgcatttttcaatttaggagttggccatgcatctacactttataatggtgagagcgtggtgaggtattgttaatcacgcaattgtagcgaggagttattgctacatatgtcgttatggcctattgattttctaaaatagctgtatcagatcatgtgacaaaataaaaataatttgttgaaagcctttacataacttgtctagacaagttatactcgttttaagacattaagggagtgaaatatatggctgtaaaaagagaagatgtaaaagccatcgtaagcgctattgggggaaaagaaaatcttgaagctgcaacgcattgtgtaacacgattacgtttagtgcttaaagatgaaagcaaagttgataaagacgcattaagtaataacgcgttggtcaaggggcagttcaaagcagaccatcaatatcaaattgtcattggtccaggaacagtcgatgaagtgtataagcagtttattgatgaaacaggtgctcaagaagcttcgaaagatgaagcgaaacaagcagctgcgaaaaaagggaatccagtacaacgtttgatcaaattgttaggggatatttttataccaatattacctgcgattgtgacagctggtttgttaatggggatcaataatttacttacaatgaaaggtttatttggtccaaaagcacttattgagatgtatccgcaaattgctgatatttcaaacatcattaatgtgattgcgagtacggcatttattttcttaccagcattaattggttggagtagtatgcgtgtatttggtggtagtccgattctaggcatagtcttaggtttgattttaatgcatccgcaattagtatctcagtatgatttggcaaaagggaatattccgacgtggaacttatttggcttagagattaagcagttgaattaccaaggtcaagtgttgcctgttttaattgcagcttatgttctagctaaaattgaaaaaggattaaataaagtcgttcacgattcgataaaaatgttggtcgttggacccgtagcgcttttagttactggatttttagcatttattatcattggaccagttgcattattgattggtacaggtattacatctggtgttacatttatattccaacatgcaggatggcttggcggagcaatatatggattgttatatgcaccacttgtaattacaggactacaccatatgtttttagcagtagatttccaattgatgggtagcagcttaggtggtacgtatttatggccaattgttgcgatttccaatatttgtcagggctctgcagcatttggagcatggtttgtctataaacgtcgtaaaatggttaaagaagaaggcttggcattaacatcttgtatttctggtatgttaggtgttactgaaccagctatgtttggtgtgaacttacctttgaaatatccatttatcgctgcgatatcaacgtcttgtgtattgggggcaatcgttggtatgaataacgtacttggaaaagttggtgttggtggcgtgccagcattcatttcaattcaaaaagaattttggccagtatatcttattgtgacagctattgctattgttgtaccatgtatactaacaattgtgatgtctcattttagtaaacaaaaagcgaaagaaattgttgaagattaataaaataaaaaaggggcgttcgttatttggacgtcctttattacgttataaggtggtaattgtgtgtcgaaagaaatagattggagaaaatccgttgtatatcaaatttatcctaagtcgtttaatgatacgacggggaatggtataggagatatcaacggaattatagaaaaattggattatatcaagttattgggtgttgattatatttggttaacaccagtgtatgaatcacctatgaatgataatggctatgatatcagcaattatttagaaatcaatgaagcctttggaacgatggatgattttgaaaagttaatcaaagttgctcatcaaaaagacttgaaagtgatgttagatattgttattaatcatacgtcgacggagcatgaatggtttaaagaagcccgtaaatctaaagataacccttatagagattattactttttcagatcatctgaagacgggccgccaacaaattggcattctaaattcggtggtaatgcatggaagtatgattctgagacagatgaatattatttacatttatttgatgtcagtcaagctgatttaaattgggataatccggaagtacgtcaatcgttatatcgcatagtcaatcattggatagacttcggcgttgatggttttcgatttgatgtcattaacttaatttctaaaggtgaatttaaggactctgacaaaataggtaaagaattttatacggatggtcctagagtgcatgagtttctgcatgaattaaatcgtcaaacgtttggtaacactgacatgatgactgtaggagaaatgtcttcgacgacgattgaaaattgtattaagtatacacaaccagaacgccaagaattgaatagtgtttttaattttcatcatctaaaggttgattatgttgatggtgaaaagtggacaaatgcgaagcttgattttcataagttaaaggaaattctgatgcaatggcaacgaggtatttatgacggtggcggatggaacgcgattttctggtgtaatcatgatcagccacgggtagtgtctagatttggtgatgatacgtcggaagagatgaggatacaaagtgctaaaatgttagctatcgcactgcatatgttgcaagggacgccatatatttaccaaggtgaagaaattggtatgacggacccacattttacatcaatagcacaatatcgtgatgttgaatcgattaatgcctaccatcagttgctaagtgaagggcatgctgaagcggatgtattagcgattttaggacagaagtcacgagacaattcgagaacgcctatgcaatggagtgatgatgttaatgctggatttacagctggtaagccttggattgatatttcggaaaattatcatcaggtcaacgttagacaagcacttcagaataaagagtctattttctatacgtatcaaaaattaatacaattaagacatacgcatgatattattacgtatggagacattgtgccacgttttatggatcatgatcatttatttgtttatgaacgtcattataagaatcaacaatggctagtaattgcgaatttctcagcatcggctgttgatttgccagaaggattggctagagaaggttgtgttgtgattcaaacaggcacagtggaaaataatacgataagcgggtttggtgcaattgtaatcgaaacaaacgcgtaaaataaattgagtggatgcgtttatatggcgaaacaaaaaaagtttatgaagatttatgaggcgttgaaagaagatatattaaacgggcagattcaatatggtgaacaaattccgtctgaacatgatttggtgcaattgtaccagtcatctcgagagaccgtgcgtaaggcattagatttgttggcattagacggcatgattcaaaagattcatggtaaagggtcacttgtcatttatcaggaggttacagagtttccattttctgaacttgttagttttaaagaaatgcaagaagaaatgggcgtcgcatatttaactgaagttgttgtgaatgaggttgttgaagcgcatgaagttccagaagttcaacatgctttaaacatcaattctagtgaatcgctcattcatattgttagaactcgtcggcttaaccaacatgtgaagattgttgatgaagattattttctaaagtcgattgtttcagatataggtaatgatgttgcgagtgattctatttatgattatttggaaaaggtattaaatcttaatattagttattcaagtaagtctattacttttgaaccgtttgatgaacaagcatatcaattgtttggtgatgtatcggtggcttattcagcaacagttcgaagtattgtgtatttagaaaatacaatgccgtttcaatataatatttcaaaacatcttgcaaatgaatttaaatttaacgacttctcaagacgtcgtataaagtaaacaatgatataaatgatttatacttgcaattaactattaaaatatagtaatatatatcttgccgtgctaggtggggaggtagcggttccctgtactcgaaatccgctttatgcgaggcttaattcctttgttgaggccgtatttttgcgaagtctgcccaaagcacgtagtgtttgaagatttcggtcctatgcaatatgaacccatgaaccatgtcaggtcctgacggaagcagcattaagtggatcatcatatgtgccgtagggtagccgagatttagctaacgactttggttacgttcgtgaattacgttcgatgcttaggtgcacggttttttattttttaaatattaaaccgattattaagagttgaaaatatatatttatttatagaagctactttcttgaagacaattcagcgtattatacgtggaacatgtttgtgggaagtagcttttttatatgtgaagtttgattcaagtgaactcgatgtgcagtttgaatgatttttgtgtcaatgaaaagtaagaagttataatttgatgataaagaaatgatggtgaaatgagggggagtatcttacaatagaattattaatgagatacgttatgattattgacaatcaaatgcctacggaggacatatgcaaatatatttaagtactttaacagagttagattatgataaatctttaaatagtattgaagaaagttttgatgataatcctgaaacgagttggcaagcacgtgcgaaagtaaaacatttaagaaaatctccttgctataattttgaattagaagtaatagcgaaaaatgaaaataacgatgtcgttggacacgttttattaattgaagtagaaattaatagtgatgataagacgtattatggtttggcgattgcctctttatcagttcatcctgaattacgtggacaaaaattaggtcgtggcttggttcaagcagtagaagagcgtgccaaagcacaagagtatagtacggttgttgtagaccattgttttgactactttgaaaagttgggttatcaaaatgctgctgagcatgacattaaattagaatctggtgatgcaccgttacttgtaaaatatttatgggataatttgacggatgcaccacacggaatcgtaaaatttccagaacatttttattaattgttcaattaagaagtaaaggtattatcatgctataatgagaggtaattgtttatggaggtgctaacttgaattatcaagccttatatcgtatgtacagaccccaaagtttcgaggatgtcgtcggacaagaacatgtcacgaagacattgcgcaatgcgatttcgaaagaaaaacagtcgcatgcttatatttttagtggtccgagaggtacggggaaaacgagtattgccaaagtgtttgctaaagcaatcaactgtctaaatagcactgatggagaaccttgtaatgaatgtcatatttgtaaaggcattacgcaggggactaattcagatgtgatagaaattgatgctgctagtaataatggcgttgatgaaataagaaatattagagacaaagttaaatatgcaccaagtgaatcgaaatataaagtttatattatagatgaggtgcacatgctaacaacaggtgcttttaatgcccttttaaagacgttagaagaacctccagcacacgctatttttatattggcaacgacagaaccacataaaatccctccaacaatcatttctagggcacaacgttttgattttaaagcaattagcctagatcaaattgttgaacgtttaaaatttgtagcagatgcacaacaaattgaatgtgaagatgaagccttggcatttatcgctaaagcgtctgaagggggtatgcgtgatgcattaagtattatggatcaggctattgcatttggtgatggtacgttaacattgcaagatgcgttgaatgtcacaggtagcgtacatgatgaagcgttggatcacttgtttgatgatattgtacaaggtgacgtacaagcatcttttaaaaaataccatcagtttataacagagggtaaagaagtgaatcgcctaataaatgatatgatttattttgtcagagatacgattatgaataaaacatctgagaaagatactgagtatcgagcactgatgaacttagaattagatatgttatatcaaatgattgatcttattaatgatacattagtgtcgattcgttttagtgtgaatcaaaacgttcattttgaagtgttgttagtaaaattagctgagcagattaagggtcaaccacaagtgattgcgaatgtagctgaaccagcacaaattgcttcatcgccaaacacagatgtattgttgcaacgtatggaacagttagagcaagaattaaaaacactaaaagcacaaggagtgagtgtcgctcctgctcaaaaatcttcgaaaaagcctgcgagaggcatacaaaaatctaaaaatgcattttcaatgcaacaaattgcaaaagtgctagataaagcgaataaggcagatatcaaattgttgaaagatcattggcaagaagtgattgatcatgccaaaaacaatgataaaaaatcactcgttagtttattgcaaaattcggaacctgtggcggcaagtgaagatcacgtacttgtgaaatttgaggaagagatccattgtgaaatcgtcaataaagacgacgagaaacgtagtagtatagaaagtgttgtatgtaatatcgttaataaaaacgttaaagttgttggtgtaccatcagatcaatggcaaagagttcgaacggagtatttacaaaatcgtaaaaacgaaggcgatgatatgccaaagcaacaagcacaacaaacagatattgctcaaaaagcaaaagatcttttcggtgaagaaactgtacatgtgatagatgaagagtgatacatgacaagcgatataatcgtatgtataatgaaagaaacatcattttattgataaatatttattgattttcaaggaggaaatggaatatgcgcggtggcggaaacatgcaacaaatgatgaaacaaatgcaaaaaatgcaaaagaaaatggctcaagaacaagaaaaacttaaagaagagcgtattgtaggaacagctggcggtggcatggttgcagttactgtaactggtcataaagaagttgtcgacgttgaaatcaaagaagaagctgtagacccagacgatattgaaatgctacaagacttagtgttagcagctactaatgaagcgatgaataaagctgatgagcttactcaagaacgtttaggtaaacatactcaaggcttaaacatccctggaatgtgatcatagatgcattatccagaacctatatcaaagcttattgatagctttatgaaattgccaggcattggtccaaagacagcccaacgtctggcttttcataccttagatatgaaagaagacgatgttgttcagtttgccaaagcattagtagatgttaagagagaattaacatattgtagcgtatgtggtcacattactgaaaatgatccatgttatatttgtgaagataaacaaagagatcgttcagttatttgtgttgtggaagatgacaaagatgtcatagctatggaaaaaatgagagaatacaaaggtttatatcacgttttacatgggtctatttcacctatggatggcattggaccagaagatattaatattccttcattgattgaacgcttgaaaagcgatgaagttagcgaattaatcttagctatgaacccgaacttagagggggaatctacagccatgtatatttctagattagttaagcctataggtatcaaagtgacgagattagcacaagggttatcggtaggtggcgatttagagtatgctgacgaagtaacattatctaaagcaatcgcaggtagaacagaaatgtaatgtcttctattaaacatttttgaatttaatactatagtaagaaaagtcacagtgtaatcattgtggctttttttatggtgtggtgtgatgtactactttatttgcggtgtggcggtggtatggtttacctagttttactgagggatgggtaatctttaggaagcaagccgttggttgtgatttgttacttctaatagtaatgatgtgaattggattatcgaattagatttacggttatggtgtgttggtgctattaatttgataaatgcggttgatggttaatgactatgcaaatgaaattcttttgtaattgaaatgatagatgctggcttagtagttgtacttctttggtctaaagcttattaaatcagcctgtatagcggtgttttgagagattatttaaaacttgtaaatttatttttaatttctggtaaaaaaataacgttctgttttgcggtttttttgattgatatggttagagaaaaatctgtttcttgttctaaaaaacgtactatttataagtggggattttttaagttcgatttttaggataagggcgttcagtacagatgacaaaggtgtaatttttactgttgttaagcagtttgaaagcctgtatagtatttatttgttgaggcaaacaaaacaactcaacttaagaaataacttgaattactaacgaaaattaattttaaaaagttgttgacttaaatgttaataaaatgtataattaattcttgtcggtaagaaaaaatgaacattgaaaactgaatgacaatatgtcaacgttaattccaaaaaacgtaactataagttacaaacattatttagtatttatgagctaatcaaacatcataatttttatggagagtttgatcctggctcaggatgaacgctggcggcgtgcctaatacatgcaagtcgagcgaacggacgagaagcttgcttctctgatgttagcggcggacgggtgagtaacacgtggataacctacctataagactgggataacttcgggaaaccggagctaataccggataatattttgaaccgcatggttcaaaagtgaaagacggtcttgctgtcacttatagatggatccgcgctgcattagctagttggtaaggtaacggcttaccaaggcaacgatgcatagccgacctgagagggtgatcggccacactggaactgagacacggtccagactcctacgggaggcagcagtagggaatcttccgcaatgggcgaaagcctgacggagcaacgccgcgtgagtgatgaaggtcttcggatcgtaaaactctgttattagggaagaacatatgtgtaagtaactgtgcacatcttgacggtacctaatcagaaagccacggctaactacgtgccagcagccgcggtaatacgtaggtggcaagcgttatccggaattattgggcgtaaagcgcgcgtaggcggttttttaagtctgatgtgaaagcccacggctcaaccgtggagggtcattggaaactggaaaacttgagtgcagaagaggaaagtggaattccatgtgtagcggtgaaatgcgcagagatatggaggaacaccagtggcgaaggcgactttctggtctgtaactgacgctgatgtgcgaaagcgtggggatcaaacaggattagataccctggtagtccacgccgtaaacgatgagtgctaagtgttagggggtttccgccccttagtgctgcagctaacgcattaagcactccgcctggggagtacgaccgcaaggttgaaactcaaaggaattgacggggacccgcacaagcggtggagcatgtggtttaattcgaagcaacgcgaagaaccttaccaaatcttgacatcctttgacaactctagagatagagctttccccttcgggggacaaagtgacaggtggtgcatggttgtcgtcagctcgtgtcgtgagatgttgggttaagtcccgcaacgagcgcaacccttaagcttagttgccatcattaagttgggcactctaagttgactgccggtgacaaaccggaggaaggtggggatgacgtcaaatcatcatgccccttatgatttgggctacacacgtgctacaatggacaatacaaagggcagcgaaaccgtgaggtcaagcaaatcccataaagttgttctcagttcggattgtagtctgcaactcgactacatgaagctggaatcgctagtaatcgtagatcagcatgctacggtgaatacgttcccgggtcttgtacacaccgcccgtcacaccacgagagtttgtaacacccgaagccggtggagtaaccttttaggagctagccgtcgaaggtgggacaaatgattggggtgaagtcgtaacaaggtagccgtatcggaaggtgcggctggatcacctcctttctaaggatatattcggaacatcttctgaagaagatgcggaataacgtgacatattgtattcagttttgaatgtttgttcattcaaattaatgggcctatagctcagctggttagagcgcacgcctgataagcgtgaggtcggtggttcgagtccacttaggcccaccattaatttaatacctatttgggggcttagctcagctgggagagcgcctgctttgcacgcaggaggtcagcggttcgatcccgctagtctccaccattatttgtacattgaaaactagataagtaagtaaaatatagattttaccaagcaaaaccgagtgaataaagagttttaaataagcttgaattcataagaaataatcgctagtgttcgaaagaacactcacaagattaataacgcgtttaaatctttttataaaagaacgtaatttcatgttaacgtttgacttataaaaatggtggaaacatagattaagttattaagggcgcacggtggatgccttggcactagaagccgatgaaggacgttactaacgacgatatgctttggggagctgtaagtaagctttgatccagagatttccgaatggggaaacccagcatgagttatgtcatgttatcgatatgtgaatacatagcatatcagaaggcacacccggagaactgaaacatcttagtacccggaggaagagaaagaaaattcgattcccttagtagcggcgagcgaaacgggaagagcccaaaccaacaagcttgcttgttggggttgtaggacactctgtacggagttacaaaggacgacattagacgaatcatctggaaagatgaatcaaagaaggtaataatcctgtagtcgaaaatgttgtctctcttgagtggatcctgagtacgacggagcacgtgaaattccgtcggaatctgggaggaccatctcctaaggctaaatactctctagtgaccgatagtgaaccagtaccgtgagggaaaggtgaaaagcaccccggaaggggagtgaaatagaacctgaaaccgtgtgcttacaagtagtcagagcccgttaatgggtgatggcgtgccttttgtagaatgaaccggcgagttacgatttgatgcaaggttaagcagtaaatgtggagccgtagcgaaagcgagtctgaatagggcgtttagtatttggtcgtagacccgaaaccaggtgatctacccttggtcaggttgaagttcaggtaacactgaatggaggaccgaaccgacttacgttgaaaagtgagcggatgaactgagggtagcggagaaattccaatcgaacctggagatagctggttctctccgaaatagctttagggctagcctcaagtgatgattattggaggtagagcactgtttggacgaggggcccctctcgggttaccgaattcagacaaactccgaatgccaattaatttaacttgggagtcagaacatgggtgataaggtccgtgttcgaaagggaaacagcccagaccaccagctaaggtcccaaaatatatgttaagtggaaaaggatgtggcgttgcccagacaactaggatgttggcttagaagcagccatcatttaaagagtgcgtaatagctcactagtcgagtgacactgcgccgaaaatgtaccggggctaaacatattaccgaagctgtggattgtcctttggacaatggtaggagagcgttctaagggcgttgaagcatgatcgtaaggacatgtggagcgcttagaagtgagaatgccggtgtgagtagcgaaagacgggtgagaatcccgtccaccgattgactaaggtttccagaggaaggctcgtccgctctgggttagtcgggtcctaagctgaggccgacaggcgtaggcgatggataacaggttgatattcctgtaccacctataatcgttttaatcgatggggggacgcagtaggataggcgaagcgtgcgattggattgcacgtctaagcagtaaggctgagtattaggcaaatccggtactcgttaaggctgagctgtgatggggagaagacattgagtcttcgagtcgttgatttcacactgccgagaaaagcctctagatagaaaataggtgcccgtaccgcaaaccgacacaggtagtcaagatgagaattctaaggtgagcgagcgaactctcgttaaggaactcggcaaaatgaccccgtaacttcgggagaaggggtgctctttagggttaacgcccagaagagccgcagtgaataggcccaagcgactgtttatcaaaaacacaggtctctgctaaaccgtaaggtgatgtataggggctgacgcctgcccggtgctggaaggttaagaggagtggttagcttctgcgaagctacgaatcgaagccccagtaaacggcggccgtaactataacggtcctaaggtagcgaaattccttgtcgggtaagttccgacccgcacgaaaggcgtaacgatttgggcactgtctcaacgagagactcggtgaaatcatagtacctgtgaagatgcaggttacccgcgacaggacggaaagaccccgtggagctttactgtagcctgatattgaaattcggcacagcttgtacaggataggtaggagcctttgaaacgtgagcgctagcttacgtggaggcgctggtgggatactaccctagctgtgttggctttctaacccgcaccacttatcgtggtgggagacagtgtcaagcgggcagtttgactggggcggtcgcctcctaaaaggtaacggaggcgctcaaaggttccctcagaatggttggaaatcattcatagagtgtaaaggcataagggagcttgactgcgagacctacaagtcgagcagggtcgaaagacggacttagtgatccggtggttccgcatggaagggccatcgctcaacggataaaagctaccccggggataacaggcttatctcccccaagagttcacatcgacggggaggtttggcacctcgatgtcggctcatcgcatcctggggctgtagtcggtcccaagggttgggctgttcgcccattaaagcggtacgcgagctgggttcagaacgtcgtgagacagttcggtccctatccgtcgtgggcgtaggaaatttgagaggagctgtccttagtacgagaggaccgggatggacatacctctggtgtaccagttgtcgtgccaacggcatagctgggtagctatgtgtggacgggataagtgctgaaagcatctaagcatgaagcccccctcaagatgagatttcccaacttcggttataagatccctcaaagatgatgaggttaataggttcgaggtggaagcatggtgacatgtggagctgacgaatactaatcgatcgaagacttaatcaaaataaatgttttgcgaagcaaaatcacttttacttactatctagttttgaatgtataatctacattcatatgtctggtgactatagcaaggaggtcacacctgttcccatgccgaacacagaagttaagctccttagcgtcgatggtagtcgaacttacgttccgctagagtagaacgttgccaggcaaaaaatggatgcgatgagccgcattgagaccgcaaggtctcttttttttatgtctaaaacgtcaaaataaaaagtaaacacaaagaaaaatggcttggcgaagtgaaaacgtttgaatctgacgaaacgagaaaagagcgcaacgagtttagtagagctaaatgagtaagcgagagccgaaggagaggaaagaagcaagcgattgtcacaagtcaagaaaggttcttagcgtcgatggtagccaacttacgttccgctagagtagaacgttgccaggcaaaaatggatgcgatgagccgcattgagaccgtgaggtctctttttttatgtctaaaacgtcaaaataaaaagtaaacacaaagaaaaatggcttggcgaagtgaaaacgtttgaatctgacgaaacgagaaaagagcgcaacgagtttagtagagctaaatgagtaagcgagagccgaaggagaggaaagaagcaagcgattgtcacaagtcaagaaaggttcttagcgaggatggtagccaacttacgttccgctagagtagaacgttgctagacaagaaatgaatgcgatgagccgcattgagtgtgaaattgatattttaataatgtgcacttttgattatttaaatctgtgactagaagtataagtgaagacattcagaagtattataaaaagtgaacagcagtaagatagtttttaatcataaatcatcttactgctgtttttagattttatgtctaatatcttttaaatcgaagtacaaaaaggaaattaattattatacaatagacaagctattgcataagtaacactaacttttgtcaaagaagtgttactatataattaatacttttgaaagtaactaattccaaaacagtgtaaataaaggaagcgtatatcatgaagcaacctattttaaataaattagaaagtttaaatcaagaagaagcgatttctttgcatgttccgggtcataaaaatatgactatcggtcatttatctcaattatcaatgacaatggataaaactgaaatacctggattagatgatttacatcatcctgaagaagtcattttggaaagtatgaagcaggtggagaaacattcagattatgatgcttatttcttagtgaatggcaccacttcaggaatattatctgtcatccagtctttttcacagaaaaaaggcgatatcttaatggcaagaaatgtacataaatctgtgttacatgcgctcgatattagccaacaagaagggcattttattgaaacgcatcaaagtccgttaacgaatcattataataaagttaatttaagccgtttgaataatgacggtcacaaacttgctgtgttgacttatcctaactattacggtgaaacatttaatgtagaagaggttatcaaatctttgcaccaattaaatattcctgtactcattgacgaagcacacggcgcgcactttggattgcaaggatttccagattctacattaaattatcaagctgactatgttgttcaatcttttcataaaacgttaccagctttaacgatgggctcggtactttatattcataaaaatgcaccttatagagaaactattatagaatatctaagctacttccaaacatctagtccttcgtatttgattatggctagtttagagtcagctgccgagttctataaaacatatgatagtaccgtgttttttgataagagagcgcaattaatcgaatgtttggagaagaagggttttgaaatgcttcaagttgatgatccgttgaagttgctgataaaatatgaaggttttacaggtcatgatattcaaaattggtttatgaatgcacatatctatttagaattagcggacgactatcaagcattagcgatattgccgttatggcatcatgatgatacgtatttatttgatttgcttttacgtaaaattgaagatatgattttaccgaaaaaatcagtttctaaagttaaacaaacacaacttttaacaactgaaggtaactataaaccaaaacgctttgaatatgttacttggtgtgatttgaaaaaggcaaaaggtaaagttctggcgcgacatattgtcccgtatccgccagggattcctattattttcaaaggagaaacaataactgaaaatatgatagaattggtaaatgaatatctggaaactggaatgatagttgaaggaattaaaaataataaaattttagttgaggatgaataaaatgtcagcttttataacttttgagggcccagaaggctctggaaaaacaactgtaattaatgaagtttaccatagattagtaaaagattatgatgtcattatgactagagaaccaggtggtgttcctactggtgaagaaatacgtaaaattgtattagaaggcaatgatatggacattagaactgaagcaatgttatttgctgcatctagaagagaacatcttgtattaaaggtcataccagctttaaaagaaggtaaggttgtgttgtgtgatcgctatatcgatagttcattagcttatcaaggttatgctagagggattggcgttgaagaagtaagagcattaaacgaatttgcaataaatggattatatccagacttgacgatttatttaaatgttagtgctgaagtaggtcgcgaacgtattattaaaaattcaagagatcaaaatagattagatcaagaagatttaaagtttcacgaaaaagtaattgaaggttaccaagaaatcattcataatgaatcacaacggttcaaaagcgttaatgcagatcaacctcttgaaaatgttgttgaagacacgtatcaaactatcatcaaatatttagaaaagatatgatataattgttagaagaggtgttataaaatgaaaatgattatagcgatcgtacaagatcaagatagtcaggaacttgcagatcaacttgttaaaaataactttagagcaacaaaattggcaacaacaggtgggtttttaagagcgggtaatacaacattcttatgtggtgtcaatgatgaccgtgtagatgaaatattgtctgtgattaatcaaacgtgtggtaatagagaacagttggtttcacctattacacctatgggaggcagtgcggattcgtacattccatatccagttgaagttgaagttggcggtgctactgtatttgttatgccagttgatgcattccatcaattttaattctataatacaatcatcaattagagatacttaaaatagtgtattaataagttattaacaattttgggttgcttgactgcgactagttcagatgccaatagatttgatttttgtggttctaaaaataatcacaaatcatggtcgctattgttgcagtaattagttgctctttggcaacctttttatataaaagcaaaagggagtttgtaatgaatggatgaacagcaacaattgacgaatgcatatcattcaaataaattatcgcatgcctatttatttgaaggtgatgatgcacaaacgatgaaacaagttgcgattaattttgcaaagcttattttatgtcaaacagatagtcaatgtgaaacaaaggttagtacatataatcatccagactttatgtatatatcaacaactgagaatgcaattaagaaagaacaagttgaacaacttgtgcgtcatatgaatcaacttcctatagaaagcacaaataaagtgtacatcattgaagactttgaaaagttaactgttcaaggggaaaacagtatcttgaaatttcttgaagaaccaccggacaatacgattgctattttattgtctacaaaacctgagcaaattttagacacaatccattcaaggtgtcagcatgtgtatttcaagcctattgataaagaaaagtttataaatagattagttgaacaaaacatgtctaagccagtagctgaaatgattagtacttatactacgcaaatagataatgcaatagctttaaatgaagaatttgatttattagcattaaggaaatcagttatacgttggtgtgaattgttgcttactaacaagccaatggcacttataggtattattgatttattgaaacaggctaaaaataaaaaactgcaatctttaactattgcagctgtgaatggtttcttcgaagatatcatacatacaaaggtaaatgtagaggataaacaaatatatagtgatttaaaaaatgatattgatcaatatgcgcaaaagttgtcgtttaatcaattaattttgatgtttgatcaactgacggaagcacataagaaattgaatcaaaatgtaaatccaacgcttgtatttgaacaaatcgtaattaagggtgtgagttagatgccaaatgtaataggtgttcagtttcaaaaagcgggaaaattagaatattatacacctaatgatatacaagtagatatagaagactgggtagttgtcgaatctaaaagaggcatagagataggtattgttaaaaatccattaatggatattgctgaagaggatgttgtgttacctcttaaaaatattattcgcattgctgatgacaaagatattgataaatttaattgtaatgaacgagatgctgaaaatgcattaatactatgtaaagacattgtaagagaacaaggtttggacatgcgtttagtcaattgcgaatatacattagataaatcgaaagttatttttaattttacggcggatgatcgtattgattttagaaaattagtaaaaatattagcgcaacatttaaaaacacgtatcgagttgagacaaattggtgtaagggatgaagccaaattgcttggcggtatcggaccttgtggtaggtcgttatgttgttctacatttttaggggattttgaaccagtatcgattaagatggctaaggatcaaaatttatcattaaatccaactaaaatttctggtgcatgtggtcgtttgatgtgttgtttaaaatatgaaaatgactattatgaggaagtacgtgcacaattacctgatattggtgaagcaattgaaacgcctgatggtaacgggaaagtagttgctttaaatatattagacatttctatgcaggtgaagcttgagggacatgaacagccacttgaatataaattagaagaaatagaaactatgcattaaggaggcattattacatttggatcgcaatgaaatatttgaaaaaataatgcgtttagaaatgaatgtcaatcaactttcaaaggaaacttcagaattaaaggcacatgcagttgaattagtagaagaaaatgtagcgcttcaacttgaaaatgataatttgaaaaaggtgttgggcaatgatgaaccaactactattgatactgcgaattcaaaaccagcaaaagctgtgaaaaagccattaccaagtaaagataatttggctatattgtatggagaaggatttcatatttgtaaaggcgaattatttggaaaacatcgacatggtgaagattgtctgttctgtttagaagttttaagtgattaatcaagcacactcaaatagtgttataattataaatgaatatggtttggataagtctgagacaatgcatgtttcaggctttaattgtgtataaagttttggtgattgcataagagatggcggtactaaatgttattattaagtgtgcacgcagtatcattagttataaaatgtagctgttaaaagtcaaaaatacatcgaatgtagttaggcatataatataaaaagagatttcaattactcaatagaaaaaggttgtcttcataggagttaaaaatgttaaaagagaatgaacgatttgatcaactaatcaaagaagattttagtattattcaaaatgatgatgttttttcgttttcaacggatgctttgttgttagggcattttacaaaacctagaacaaaagatattgtgttggacttatgttcaggcaatggggtgatacccttgttattgtttgcgaaacatccacgacatatagaaggtgttgagattcaaaaaacacttgtcgatatggcgcgacgcacatttcaattcaatgatgttgatgaatatttaacaatgcatcacatggatttgaaaaacgttactaaagtatttaaaccttcacaatatactttagtaacgtgtaatccgccttattttaaagagaatcagcaacaccaacatcaaaaagaagcacataagatagcgagacatgagattatgtgtacacttgaagattgcatgattgcagcccgtcatttattaaaagaaggtggcaggctaaatatggtacatcgtgcagatagactaatggatgtcttgtttgaaatgagaaaagtgaatattgaacctaagaaagtcgtttttatatatagtaaggtagggaaatcagcacaaacgatagtagtagaaggtcgaaaaggtggaaatcaaggtttagaaatcatgcccccattttatatttataatgaagatggtaattatagcgaagaaatgaaggacgtatattatggatagtcattttgtatatattgtaaaatgtagtgatggaagtttatatacaggatacgctaaagacgttaatgcacgtgttgaaaaacataaccgaggtcaaggagccaaatatacgaaagtaagacgtccggtgcatttagtttatcaagaaatgtatgagacaaagtctgaagcattgaagcgtgaatatgaaattaaaacttataccagacaaaagaaattgcgattaattaaggagcgatagtatggctgtattatatttagtgggcacaccaattggtaatttagcagatattacttatagagcagttgatgtattgaaacgtgttgatatgattgcttgtgaagacactagagtaactagtaagctgtgtaatcattatgatattccaactccattaaagtcatatcacgaacataacaaggataagcagactgcttttatcattgaacagttagaattaggtcttgacgttgcgctcgtatctgatgctggattgcccttaattagtgatcctggatacgaattagtagtggcagccagagaagctaatattaaagtagagactgtgcctggacctaatgctgggctgacggctttgatggctagtggattaccttcatatgtatatacatttttaggatttttgccacgaaaagagaaagaaaaaagtgctgtattagagcaacgtatgcatgaaaatagcacattaattatatacgaatcaccgcatcgtgtgacagatacattaaaaacaattgcaaagatagatgcaacacgacaagtatcactagggcgtgaattaactaagaagttcgaacaaattgtaactgatgatgtaacacaattacaagcattgattcagcaaggcgatgtaccattgaaaggcgaattcgttatcttaattgaaggtgctaaagcgaacaatgagatatcgtggtttgatgatttatctatcaatgagcatgttgatcattatattcaaacttcacagatgaaaccaaaacaagctattaaaaaagttgctgaagaacgacaacttaaaacgaatgaagtatataatatttatcatcaaataagttaatcactttatcgattatatgaaattttaaacgattttataaacgcaagctgtaattttaaatggtaagttatcattttgcattgatactgataaaatgatgttgactatgataaaaaaatgatgacatcgacgttttttaatgtaaaataaatacattgaaagtaataaataccttaacattgaataagatgaaaatgagatgacgagataaatgttcgcgtccgttgaaatgcatagaaatcttagatattatttgaagtgagacattacgaggaggaacagttatggctaaagaaacattttatataacaaccccaatatactatcctagtgggaatttacatataggacatgcatattctacagtggctggagatgttattgcaagatataagagaatgcaaggatatgatgttcgttatttgactggaacggatgaacacggtcaaaaaattcaagaaaaagctcaaaaagctggtaagacagaaattgaatatttggatgagatgattgctggaattaaacaattgtgggctaagcttgaaatttcaaatgatgattttatcagaacaactgaagaacgtcataaacatgtcgttgagcaagtgtttgaacgtttattaaagcaaggtgatatctatttaggtgaatatgaaggttggtattctgttccggatgaaacatactatacagagtcacaattagtagacccacaatacgaaaacggtaaaattattggtggcaaaagtccagattctggacacgaagttgaactagttaaagaagaaagttatttctttaatattagtaaatatacagaccgtttattagagttctatgaccaaaatccagattttatacaaccaccatcaagaaaaaatgaaatgattaacaacttcattaaaccaggacttgctgatttagctgtttctcgtacatcatttaactggggtgtccatgttccgtctaatccaaaacatgttgtttatgtttggattgatgcgttagttaactatatttcagcattaggctatttatcagatgatgagtcactatttaacagatactggccagcagatattcatttaatggctaaggaaattgtgcgattccactcaattatttggcctattttattgatggcattagacttaccgttacctaaaaaagtctttgcacatggttggattttgatgaaagatggaaaaatgagtaaatctaaaggtaatgttgtagaccctaatattttaattgatcgctatggtttagatgctacacgttattatctaatgcgtgaattaccatttggttcagatggcgtatttacacctgaagcatttgttgagcgtacaaatttcgatctagcaaatgacttaggtaacttagtaaaccgtacgatttctatggttaataagtactttgatggcgaattaccagcgtatcaaggtccacttcatgaattagatgaagaaatggaagctatggctttagaaacagtgaaaagctacactgaaagcatggaaagtttgcaattttctgtggcattatctacggtatggaagtttataagtagaacgaataagtatattgacgaaacaacgccttgggtattagctaaggacgatagccaaaaagatatgttaggcaatgtaatggctcacttagttgaaaatattcgttatgcagctgtattattacgtccattcttaacacatgcgccgaaagagatttttgaacaattgaacataaacaatcctcaatttatggaatttagtagtttagagcaatatggtgtgcttactgagtcaattatggttactgggcaacctaaacctattttcccaagattggatagcgaagcggaaattgcatatatcaaagaatcaatgcaaccgcctgctactgaagaggaaaaagaagagattcctagcaaacctcaaattgatattaaagactttgataaagttgaaattaaggcagcaacgattattgatgctgaacatgttaagaagtcagataagcttttaaaaattcaagtagacttagattctgaacaaagacaaattgtatcaggaattgccaaattctatacaccagatgatattattggtaaaaaagtagcagttgttactaacctgaaaccagctaaattaatgggacaaaaatctgaaggtatgatattatctgctgaaaaagatggtgtattaaccttagtaagtttaccaagtgcaattccaaatggtgcagtgattaaataactgtatttttaaaaattaggagagataattatgttaatcgatacacatgtccatttaaatgatgagcaatacgatgatgatttgagtgaagtgattacacgtgctagagaagcaggtgttgatcgtatgtttgtagttggttttaacaaatcgacaattgaacgcgcgatgaaattaatcgatgagtatgattttttatatggcattatcggttggcatccagttgacgcaattgattttacagaagaacacctggaatggattgaatctttagctcagcatccaaaagtgattggtattggtgaaatgggattagattatcactgggataaatctcctgcagatgttcaaaaggaagtttttagaaagcaaattgctttagctaagcgtttgaagttaccaattatcattcataaccgtgaagcaactcaagactgtatcgatatcttattggaggagcatgctgaagaggtaggcgggattatgcatagctttagtggttctccagaaattgcagatattgtaactaataagctgaatttttatatttcattaggtggacctgtgacatttaaaaatgctaaacagcctaaagaagttgctaagcatgtgtcaatggagcgtttgctagttgaaaccgatgcaccgtatctctcgccacatccgtatagagggaagcgaaatgaaccggcgagagtaactttagtagctgaacaaattgctgaattaaaaggcttatcttatgaagaagtgtgcgaacaaacaactaaaaatgcagagaaattgtttaatttaaattcataaagttaaaagtgagaaagatcaccgccataaatgtaaacgatgctatattcgtttaatatgctatggttctttctcacttttttaaattaaaatatcgtacatgtgcaatacgtacgatagagatggttagagctttgaaattaagaattgtaggaaggcgttttaaatgaaaatcaatgagtttatagttgtagaaggacgagatgatactgagcgtgttaaacgagctgttgaatgtgatacgattgaaacgaatggtagtgccatcaacgaacaaactttagaagtaattagaaatgctcaacaaagtcgaggcgttattgtattaacagatccagatttcccaggagataaaattagaagtacaattactgaacatgtcaaaggtgttaaacatgcgtatattgatagagaaaaagctaaaaataaaaaagggaaaattggtgttgaacatgccgacttaattgatattaaagaagcgttaatgcatgttagttcaccctttgatgaagcttatgaatcaattgataaatctgtgctaatagagttggggttaatcgttgggaaagatgcaaggcgccgtagagaaattttaagtagaaaattgcgaatcggccattccaatggtaagcagttattgaaaaagttaaatgcatttggttataccgaagcggatgtaaggcaagctttagaagatgaatgaggaagtgaaaatgttggataataaagatattgcaacaccatcaagaacgcgagcgttgttagataaatatggctttaattttaaaaaaagtttaggacagaactttttgatagatgtgaatatcattaataatatcattgatgcaagtgatattgatgcacaaactggggtgattgaaattggtccaggtatggggtcgttgacagaacaattggccagacatgctaaaagagtattggcatttgaaattgatcaacgtttaatacctgtattaaatgatactctatcaccttatgataatgtgacggtgattaatgaagatattttaaaagcgaatattaaagaagctgttgaaaatcatttacaagattgcgaaaaaataatggttgttgcaaacctgccgtactatattacgacgccaattttattaaatttaatgcaacaagatataccaattgatggctacgtggtgatgatgcaaaaagaagtgggcgaacgcttaaatgctgaagtaggttcaaaagcatatggttcattatcaattgtcgtacaatactatacagagactagtaaagtattaacggtacctaaatctgtatttatgccaccacctaatgttgattcaatagttgtaaaactgatgcagagaactgaaccgttagtaacagtagataacgaggaagcattctttaagttagcaaaagcagcatttgcacaaagaagaaagacaattaacaataactatcaaaattattttaaagatggtaaacaacacaaagaagtgattttacaatggttggaacaagcaggtattgatccaagacgtcgcggtgaaacgctatctattcaagattttgctaaattgtatgaagaaaagaaaaaattccctcaattagaaaattaaatgattgacaaagcaaagcactattgttaaaatttaaattttgtttgacgaaaacgctgcaaatatggtattatgtaacttgtagcgaggtggagcaatatgccaaaatcaattttggacatcaaaaattctattgattgtcatgtaggaaatcgtattgtactgaaagccaatggaggccgtaagaaaacaataaaacgttctggaattttaaaagaaacatatccgtcagttttcattgttgagttagatcaagacaaacacaactttgagagagtatcttatacatacactgatgtgttaactgaaaatgttcaagtttcatttgaagaggataatcatcacgaatcaattgcacactaaataagacatatagagatgttaggcgtttcttagtataagaagtaaatattatgataattatttgagtgttgggcattatgttcaatactctttttatttacaaaatgtttaacactgatgtttcgcttatagatttttcagtaaatggataattgtatttataaacacaaatacaagtaaatactaagtaattagatggagaaaattacttttttattaaaaaaacactaaaaaacaaattaaaatgtcaaatattaattctctttatgttaaaatcatcatattaagataacgaaaagagggcggaaaatgatatatgaaacggcaccagccaaaattaattttacgctcgatacactttttaaaagaaatgatggctatcatgagattgaaatgataatgacaacagttgatttaaatgatcgtttaacttttcataaaagaaaagatcgaaagatagttgttgagattgaacataattatgtgccttctaatcataaaaatctcgcatatcgtgcagcgcaactatttattgagcaatatcaactaaagcaaggtgtaacaatttctatcgataaagaaatacctgtttctgctggcttagctggaggttcggctgatgcagcagcaacgttaagaggattgaatcgactttttgatataggggcgagtttggaagaattggctctactaggcagtaaaattgggacagatattccgttttgtatttataataaaactgcactatgtactggaagaggagagaaaatcgagtttttaaataaaccaccttcagcttgggtgattcttgctaaaccaaacttaggcatatcatcaccagatatatttaagttgatcaatttagataagcgttacgacgtacatacgaaaatgtgttatgaggccttagaaaatcgagattatcaacaattatgtcaaagtttgtctaatcgattagagccaatttctgtttcaaaacacccacaaatcgataaattaaaaaataatatgttgaaaagtggtgcagatggtgcgttaatgagtggaagcggaccgactgtgtatgggctagcacgaaaagaaagccaagcaaaaaatatttataatgcagttaacggttgttgtaatgaagtgtacttagttagactattaggatagaagggttgaaaagatgagatataaacgaagcgagagaattgtttttatgacgcaatatttgatgaaccatccgaataaattgattccattaactttttttgtgaaaaaatttaaacaggcgaaatcttcaataagtgaagatgtccaaattataaaaaatacattccaaaaagaaaagttaggtacagtaattactactgctggcgcaagtggtggtgttacgtataaaccaatgatgagtaaagaagaggcgactgaagttgttaatgaggtcattactctattagaagagaaagaacgtttgttacctggcgggtatttatttttatcagatttggtaggtaatccatcgctactaaacaaagttggtaagttaattgccagtatttacatggaagaaaaattagatgctgttgttaccattgcgacaaaaggtatttcattggcaaatgcggttgctaatattttaaatttaccagtagtagtgattagaaaagacaacaaggtgactgaaggttctacagtttcaattaattacgtttcaggatcttcaagaaaaatagagacaatggtactttcgaagagaactttagcagaaaattcaaatgttttagttgtcgatgattttatgagggctggtggctctattaatggtgttatgaatttaatgaatgagtttaaagcccatgtaaaaggggtatcagtacttgtagaatcaaaagaagttaaacaaagattgattgaagattatacttccttagtgaaattatctgatgtagatgaatataatcaagagtttaacgtagaacctggcaacagtttatctaagttttcataaaaggagttttagtattatgaaaatcattaacacaacaagattaccggaagcacttggaccatattcgcatgcaacagttgtgaatggtatggtttatacttctggtcagattccattgaatgttgatgggaaaatcgtaagcgctgatgttcaagcacagacaaaacaagttttagaaaatttaaaggttgttttggaagaagcaggatctgatttgaattctgttgcgaaagcgaccattttcattaaagatatgaatgatttccaaaaaataaatgaagtgtatggtcaatattttaatgaacacaagccagcgcgtagttgtgtagaggttgcgcgtttgccaaaagatgtgaaagtagaaattgaattagtaagtaaaattaaggaattataattttcgattaatatgtttaatcaagcttctaaataaaacagagagatatatactataggggggctcactacatgaaagtgacagatgtaagacttagaaaaatacaaacagatggacgaatgaaagcactcgtttccattacattagatgaagctttcgtaattcatgatttacgtgtaattgaaggaaactctggcttgttcgttgcaatgccaagtaaacgtacaccagatggtgaattccgcgacatcgcgcatcctattaattcagatatgagacaagaaattcaagatgcagtgatgaaagtatatgatgaaacagatgaagtagtaccagataaaaacgctacatcagaagattcagaagaagcttaatcaattttatatttagcgatgtaatacatttgcaataagttgatttgatactgtcgataaagcataaagctttgtcggcagtttttttagtttgtattaatgtttttttagtttgtattaatgtttttttatttttaatgaaaggctaataaatatatacgttaacagattatgatgatatgaaaattattgatttattgctgataaaaattgcgtttgaatgatgctcgtatttttgaagtaagaaaaaagttgtttttaaaattacaacgaattaaaaacaatgccttttatatgttgaaagagtattgcagattaaattataataatgacgaagtgtaaaatttaatgggggttaatgttcatgcgaagacacgcgataattttggcagcaggtaaaggcacaagaatgaaatctaaaaagtataaagtgctacacgaggttgctgggaaacctatggtcgaacatgtattggaaagtgtgaaaggctctggtgtcgatcaagttgtaaccatcgtaggacatggtgctgaaagtgtaaaaggacatttaggcgagcgttctttatacagttttcaagagaaacaactcggtactgcgcatgcagtgcaaatggcgaaatcacacttagaagacaaggaaggtacgacaatcgttgtatgtggtgacacaccgctcatcacaaaggaaacattagaaacattgattgcgcatcatgaggatgctaatgctcaagcaactgtattatctgcatcgattcaacaaccatatggatacggaagaatcgttcgaaatgcgtcaggtcgtttagaacgcatagttgaagagaaagatgcaacgcaagctgaaaaggatattaatgaaattagttcaggtatttttgcgtttaataataaaacgttgtttgaaaaattaacacaagtgaaaaatgataatgcgcaaggtgaatattacctccctgatgtattgtcgttaattttaaatgatggcggcatcgtagaagtgtatcgtaccaatgatgttgaagaaatcatgggtgtaaatgatcgtgtaatgcttagtcaggctgagaaggcgatgcaacgtcgtacgaatcattatcacatgctaaatggtgtgacaatcatcgatcctgacagcacttttattggtccagacgttacaattggtagtgatacagtcattgaaccaggcgtacgaattaatggtcgtacagaaattggcgaagatgttgttattggtcagtactctgaaattaacaatagtacgattgaaaatggtgcatgtattcaacagtctgttgttaatgatgctagcgtaggagctaatactaaggtcggaccgtttgcgcaattgagaccaggcgcgcaattaggtgcagatgttaaggttggaaattttgtagaaattaaaaaagcagatcttaaagatggtgccaaggtttcacatttaagttatattggcgatgctgtaattggcgaacgtactaatattggttgcggaacgattacagttaactatgatggtgaaaataaatttaaaactatcgtcggcaaagattcatttgtaggttgcaatgttaatttagtagcacctgtaacaattggtgatgatgtattggtggcagctggttccacaatcacagatgacgtaccaaatgacagtttagctgtggcaagagcaagacaaacaacaaaagaaggatataggaaataatcatttacgtatttaaaatggctaggataaaaggataatcctatgtaatattaatgtaatctttatgatttaatgattcgcatagtaatggagttacattttatatataatagtaattgcgtaagtaaataattggaggactataaatgttaaataatgaatataagaattcgtcattaaagattttttcattgaaaggaaacgaagcattagcgcaagaagttgctgaccaagtaggaattgaactaggtaaatgttcagttaaacgttttagtgatggagaaattcaaattaatatcgaagagagtattcgtggttgtgacgtatttattattcaaccaacatcatatcctgtgaatctacatttaatggaattattaattatgattgatgcttgtaaacgtgcttctgcagcaacaatcaatattgtagtgccatattatggatatgcaagacaagatagaaaagcccgtagccgtgagccaatcactgctaaattagttgcaaacttaatcgaaacagctggcgcaactcgtatgattgcgttagacttacatgcaccacaaattcaaggattctttgatattccaattgaccacttaatgggtgtgccaattcttgctaaacatttcaaagatgatccgaatattaacccagaagaatgtgtcgttgtttcaccagaccatggcggtgttacacgtgcacgtaaattagctgacattttaaaaactccaattgcaattatagataaacgtcgtcctagaccaaatgttgctgaagtgatgaacattgttggtgagattgaaggacgtacggcaattattattgacgatattattgatacagcaggtacaatcactttagctgcacaagcattaaaagataaaggtgctaaagaagtatatgcttgttgtacacaccctgttttatcaggaccggctaaagaacgtatcgaaaattctgctataaaagaattaatcgtaacaaactcaattcatttagatgaagatcgcaaaccatctaacactaaagaattatctgttgctggtttaatcgcacaagctatcattcgtgtatacgaaagagaatcagttagcgtattatttgactaatatttaaaaggcgtttgacgaacatattccaaacgtgtataatagtttcgttcgtgattatacgaataaataaacacttgcaagcaacgatgatgttgatgggtaagtgaggtgctcgttttgagcaaaaatgaaaggtggaaatgagaatggcttcattaaagtcaatcatccgtcaaggtaaacaaacacgttcagatcttaaacaattaagaaaatctggtaaagtaccagcagtagtatacggttacggtactaaaaacgtgtcagttaaagttgatgaagtagaattcatcaaagttatccgtgaagtaggtcgtaacggtgttatcgaattaggcgttggttctaaaactatcaaagttatggttgcagactaccaattcgatccacttaaaaaccaaattactcacattgacttcttagcaatcaatatgagtgaagaacgtactgttgaagtaccagttcaattagttggtgaagcagtaggcgctaaagaaggcggcgtagttgaacaaccattattcaacttagaagtaactgctactccagacaatattccagaagcaatcgaagtagacattactgaattaaacattaacgacagtttaactgttgctgatgttaaagtaactggcgacttcaaaatcgaaaacgattcagctgaatcagttgtaacagtagttgctccaactgaagaaccaactgaagaagaaatcgaagctatggaaggcgaacaacaaactgaagaaccagaagttgttggcgaaagcaaagaagacgaagaaaaaactgaagagtaattttaatctgttacattaaagtttttatactttgtttaacaagcactgtgcttattttaatataagcatggtgctttttgtgttattataaagcttaattaaactttattactttgtactaaagtttaattaattttagtgagtaaaagatattaaactcaacaatgatacatcataaaaattttaatgtactcgattttaaaatacatacttactaagctaaagaataatgataattgatggcaatggcggaaaatagatgttgtcattataataataaatgaaacaattatgttggaggtaaacacgcatgaaatgtattgtaggtctaggtaatataggtaaacgttttgaacttacaagacataatatcggctttgaagtcgttgattatattttagagaaaaataatttttcattagataaacaaaagtttaaaggtgcatatacaattgaacgaatgaacggagataaagtgttatttatcgaaccaatgacaatgatgaatttgtcaggagaagcagttgcaccgattatggattattacaatgttaatccagaagatttaattgtcttatatgatgatttagatttagaacaaggacaagttcgcttaagacaaaaaggaagtgcgggcggtcacaatggtatgaaatcaattattaaaatgcttggtacagaccaatttaaacgtattcgtattggtgtgggaagaccaacgaatggtatgacggtacctgattatgttttacaacgcttttcaaatgatgaaatggtaacgatggaaaaagttatcgaacacgcagcacgcgcaattgaaaagtttgttgaaacatcacgatttgaccatgttatgaatgaatttaatggtgaagtgaaataatgacaatattgacaacgcttataaaagaagataatcattttcaagaccttaatcaggtatttggacaagcaaacacactagtaactggtctttccccgtcagctaaagtgacgatgattgctgaaaaatatgcacaaagtaatcaacagttattattaattaccaataatttataccaagcagataaattagaaacagatttacttcaatttatagatgctgaagaattgtataagtatcctgtgcaagatattatgaccgaagagttttcaacacaaagccctcaactgatgagtgaacgtattagaactttaactgcgttagctcaaggtaagaaagggttatttatcgttcctttaaatggtttgaaaaagtggttaactcctgttgaaatgtggcaaaatcaccaaatgacattgcgtgttggtgaggatatcgatgtggaccaatttcttaacaaattagttaatatggggtacaaacgggaatccgtggtatcgcatattggtgaattctcattgcgaggaggtattatcgatatctttccgctaattggggaaccaatcagaattgagctatttgataccgaaattgattctattcgcgattttgatgttgaaacgcagcgttccaaagataatattgaagaagtcgatatcacaactgcaagtgattatatcattactgaagaagtgattagacatcttaaagaagagttgaaaactgcatatgaaaatacaagacccaaaatagataaatcagtgcgcaatgatctgaaagaaacgtatgaaagctttaaattattcgaaagtacatactttgatcatcaaatactacgtcgtttagtagcgtttatgtatgaaacaccttcgacaattattgagtatttccaaaaagatgcaatcattgcagttgatgaatttaatcgtattaaagaaactgaagaaagtttaacagtagagtctgattcgtttattagcaatattattgaaagtggtaatggatttataggacaaagttttataaaatatgatgattttgaaacattgattgaaggctatcctgtcacttatttttcattattcgctacaacaatgccgataaaactaaatcatattattaaattttcatgtaaacctgtccaacaattttatgggcaatatgacattatgcgttctgaatttcaacgatatgtcaatcaaaattatcatatcgtggttttggtcgaaactgaaactaaagttgaacgtatgcaagcgatgttaagtgaaatgcatattccatcaataacaaaattgcatcgctcaatgtcatcggggcaagcagtgattattgaaggcagtttatctgaaggatttgaactacctgatatgggattagttgtcattactgagcgtgagctttttaaatcaaaacagaaaaagcaacgaaaacgtacgaaagctatctcaaatgctgaaaaaattaagtcttaccaagatttaaatgtgggagattatattgttcatgtgcatcatggtgttggtagatatttaggtgttgagacgctcgaagtggggcaaacgcatcgtgattatattaaattgcaatataaaggtacggatcaactatttgttccagtagatcaaatggatcaagttcaaaaatatgtagcttcggaagataagacgccaaaattaaataaactcggtggcagtgaatggaaaaaaacaaaagcaaaagttcaacaaagtgttgaagatattgctgaagagttgattgatttatataaagaaagagaaatggcagaaggttatcaatatggggaagacacagctgagcaaacaacatttgaattagattttccatatgaacttacgcctgaccaagctaaatctatcgatgaaattaaagatgacatgcaaaaatcgcgtccaatggatcgcttgctatgtggtgatgttggttatggtaaaactgaagttgcagtgagagcagcattcaaagctgtaatggaaggaaagcaagttgcatttttagttcctacaactattttagctcagcaacattatgagacgttaattgagcgtatgcaagattttcctgttgaaattcaattaatgagtcgttttagaacgccgaaagagataaaacaaactaaggaaggacttaaaactgggtttgttgacatagttgttggtacacacaaattacttagtaaagatatacagtataaagatttagggctgttgattgtagatgaagaacaacgatttggtgtacgccataaagagcgtattaaaacattaaaacataatgtagatgtactaacattgactgcaaccccaatacctagaacattgcatatgagtatgctaggtgtgcgcgatttgtcagtgattgaaacgccgccagaaaatcgtttcccagttcaaacatatgtattagaacagaacatgagttttatcaaagaagctttagaaagagaactatcccgtgatggccaagtgttttatctttataataaagtgcaatccatttatgaaaaacgagaacaactccagatgttaatgccagatgctaacattgcagttgctcatggacaaatgacagagcgcgatttagaagaaacgatgttaagttttatcaataatgaatatgatattttagtaacgacgacgattattgaaacaggtgtcgatgtcccaaatgcaaatactttgatcattgaagatgcagatcgctttggattgagtcagttgtatcaattaagaggtcgtgttggtcgttcaagtcgtattggttatgcatacttcttacatccagcaaataaggtactaactgagaatgcagaagatcgattacaagcgattaaagaatttacggagttaggctcaggatttaagattgcgatgcgtgatttgaacattcgtggtgctggtaatttgttaggtaaacaacagcacggctttattgatacagttggatttgatttgtacagtcaaatgttagaagaagctgtaaatgaaaaacgtggtattaaggaaccagaatctgaggtgccagaagtcgaagttgatttaaacttggatgcatatttgccaacagaatatattgcaaatgaacaagctaaaattgaaatttataaaaagctacgaaaaactgaaacatttgatcaaattatcgacattaaagatgaattaattgatcgttttaatgattatcctgttgaagtagcacgtttgcttgatatagtggaaataaaagtacacgcattacattcaggtatcacgttgattaaagataaagggaaaataattgatattcatttatctgtaaaagccactgaaaatattgatggcgaagtgctgttcaaagcaacacaacctttaggtagaacaatgaaggttggtgttcaaaataatgcaatgacaattactttaacgaaacaaaatcaatggcttgatagtttgaagtttttagttaagtgcattgaagaaagcatgagaatcagtgatgaagcataaagaagcatttaatggcgttgtcgtgttaactgctgcattaattgtcattaaaattctgagtgctgtatatcgaattccatatcaaaatatattaggtgatacaggtttgtatgcatatcaacaagtgtatccaattgtagcattaggaatgatattatcgatgaatgccattcctagtgcaattacacaaaatatagggaagtatcatagtgacgaagcatatgcaaaagcggtcgcttatatacaattagttggtatattattatttattgctatttttgtgtttgcgaacaatattgcacatatgatgggtgatagccatttaacaccaatgattcaagcagcaagtttaagctttatatttataggtatgcttggcgtgttaagaggttattatcaatctgcaaataatatgacagttccggctatttcccaggttatagaacaagttatacgagtaggtattatcattgttactattgttatttttgtagacagaggttggacgatatatgaagcgggaacaattgctattttagcatcaacgataggttttttaggttcttcaatttatttagtagcgcaccgaccttttaagtttaaaatggtaaataacactgcaaagattgtttggaaacagttcgcactttcggttttgattttcgctatcagtcaattaatcgtaattttatggcaagtgattgatagtgttactattattaagtcacttcaagcgatacgcgtgccattcgatgttgccataactgaaaaaggagtctatgaccgtggtgcatcatttattcagatgggattgattgtaactacaacatttagttttgcgctcattcctctgttaagtgacgcaatcaaaatgaataatcaggtacttatgaatcgttatgcaaatgcgtcattaaagattacgattttaataagtacagcagcgggaataggattaattaatttattgcctttaatgaacggtgtgttttttaagacgaatgatttaaccttaacgttaagtgtttatatgattacggtcatttgtgtatcgttaattatgatggatatggctttattacaagcgcaacatgctgtgagacctatttttgttggtatgacggcaggattggttattaaatttatacttaatatcattttgattcgtttaagtggcattattggtgcgagcattagtactgttgtatcattaattatattcggtacgattatccatattgctgtcacgagaaaataccacttacatgcgatgagacgattttttatcaatgttgttttaggtatggtatttatgtcgattgttgttcaatgcgtgttaaacatagtgacaacacacggtagattcactggactcattgaattattatgtgcagcagtattaggtatcattgcattgtttttctatatttttagatttaatgttttgacatataaagagttaacttatttaccatttggttcaaagttgtatcaaattaagaaaggaagacgttgatggcacataccattacgattgttggcttaggaaactatggcattgatgatttgccgctagggatatataaatttttaaagacacaagataaagtttatgcaagaacgttagatcatccagttatagaatcattgcaagatgaattaacatttcagagttttgaccatgtttatgaagcacatgaccaatttgaagatgtctataacgatattgtggcgcaattggttgaagctgctaatgaaaaagatattgtctatgcggttccgggtcatcctagagttgctgagacaactacagtgaaattactggctttagcaaaggacaatactgatatagatgtgaaagttttaggtggtaaaagctttattgatgatgtgtttgaagcagttaatgtagatccaaatgatggcttcacactgttagatgcgacatcattacaagaagtaatacttaatgttagaacgcatacattgattacgcaagtttatagtgcaatggttgctgctaatttgaaaatcactttaatggaacgatatcctgatgattaccctgttcaaattgtcactggtgcacgaagcgatggtgcggataacgttgtgacatgcccattatatgaattggatcatgatgaaaatgcattcaataatttgacgagtgtattcgtaccaaaaatcataacatcgacatatttgtatcatgactttgattttgcaacggaagtgattgatactttagttgatgaagataaaggttgtccatgggataaagtgcaaacgcatgaaacgcttaagcgttatttacttgaagaaacatttgaattgttcgaagctattgacaatgaagatgattggcatatgattgaagaactaggagatattttattacaagtgttattgcatactagtattggtaaaaaagaagggtatatcgacattaaagaagtgattacaagtcttaatgctaaaatgattcgtagacacccacacatatttggtgatgccaatgctgaaactatcgatgacttaaaagaaatttggtctaaggcgaaagatgctgaaggtaaacagccaagagttaaatttgaaaaagtatttgcagagcatttttttaatttatatgagaagacgaaggataagtcatttgatgaggcctcgttaaagcagtggctagaaaaaggggagagtaatacatgagattagataaatatttaaaagtatcacggttaataaagcgacgtacgctagcaaaagaagtaagtgatcaaggtagaattacaataaatggtaatgttgctaaagctggatcggatgttaaagttgaagatgtgctgacgattcgctttggtcaaaaattagtaacagttaaagtaactgcattaaatgaacatgcatctaaagataacgcgaagggcatgtatgaaatcattgaagagcgtcgacttgaagaagcgtaaattggaggtgacaagcaatgaaaaataaagtagaacatatagaaaatcagtacacgtcgcaagagaacaagaaaaaacaacgtcaaaaaatgaaaatgcgtgttgttcgtaggcgtattacagtatttgcgggcgtattacttgcgataattgttgttttatcaatcttgcttgttgtccaaaaacatcgcaatgatattgatgcacaggagcgaaaagcgaaagaagcacagtttcaaaagcaacaaaatgaagaaattgcgttaaaagaaaagttgaataatctgaatgacaaagattacattgaaaaaattgcgcgtgatgattattacttaagcaacaaaggtgaagtgatttttaggttgccagaagacaaagattcgtctagctcaaaatcttcgaaaaaataaatccaaattgattcaaaattatccgagtatagacattgtgaaaaaatccaaacaaggatataataagggaaaatcgaatcaaatcgggaggatttatttaacatatgtcaatcgaagttggaaataagcttaaaggtaaagtcactggtattaaaaagtttggtgcattcgtagaattacctgaaggaaaaagtggtttagttcacattagtgaagtcgcagataattatgttgaaaacgtagaagagcacctttctgttggtgatgaagtagacgtgaaagtattatctattgctgatgatggaaaaattagtctttcaattaagaaagctaaagaccgtccacgtagacaacatacgagtaaaccaagtcatcaaaaaccagtgcaaaaagccgaagattttgaaaagaaattaagcaatttcttaaaagatagtgaagataaattaacttcaatcaaacgtcaaacagaatctagacgcggtggcaaaggttctagacgttaattaaaataaataaagactgtttcgataaggaatatatttagaatgatgcgtatcgaataatcgattgcagcgttagacaatctaagactgtttcttaaataaggagcagtctcttttatttgtaatgatataactaagacttataccatttttgaaaattgtaaaagtgaggtgatgttatgcagttaaatagtaatggttggcatgttgatgaccatattgttgtcgctgtttctacaggtattgatagtatgtgtttattgtatcaactactaaatgattataaagatagttatagaaaactaacatgcttacatgtcaatcatggcgttaggtcagcttcaattgaggaagccagatttttagaagcatactgcgaacgtcatcacattgatttacatatcaaaaagttagatttgtcgcatagtctcgaccgaaataacagcattcagaatgaagctcgaattaaacgttacgaatggtttgatgaaatgatgaatgtattagaagcggatgtattgctaacggcgcatcatttggacgatcaattagaaactattatgtatcgtatttttaatgggaaatcaacgcgtaataaactaggatttgatgagttatcgaagcgaaaaggttatcagatttatcgaccacttttagctgtctctaaaaaagaaataaaacaattccaagagagatatcatattccatattttgaagatgaatctaataaagataacaaatatattagaaatgatattcgtaatagaattattccagctattgatgaaaataatcaacttaaagtatcgcatttattaaaattaaaacaatggcatgatgaacaatatgatattttgcaatattcagctaaacaatttattcaagaatttgtgaagtttgatgaacagtcaaaatatttagaggtttctagacaagcttttaataacttaccaaactcattaaagatggttgtgttggactgcctattatcaaagtattatgagttgtttaatattagtgctaaaacatacgaagagtggtttaaacaatttagtagtaagaaagcacaattcagtattaatctcacggataaatggataattcaaatcgcatatggtaaattaataataatggctaaaaataatggcgatacatattttagagttcaaacaattaaaaagccaggtaattatttttttaacaaatatcgattagagatacattctaatttaccaaaatgtttatttccgcttacagtgagaacacgacaaagtggcgatacatttaaactgaatgggcgcgatggttataagaaagtgaatcgcctgtttatagattgtaaagtgccacagtgggttcgggatcaaatgccaatcgtattggataaacaacagcgcattattgcggtaggagatttatatcaacaacaaacaataaaaaaatggattataattagtaaaaatggagatgaatagcgttatgcataatgatttgaaagaagtattgttaactgaagaagatattcaaaatatctgtaaggaattgggagcacaattaacaaaggattatcaaggtaaaccattagtatgcgtgggtatcttaaaaggctcagcaatgtttatgtcagatttaattaaacgaattgatacccatttatcaattgatttcatggatgtttctagttatcacggaggcactgagtcaactggtgaagttcaaatcattaaagatttaggttcttctattgaaaataaagacgtattaattattgaagatatcttagagactggtactacacttaagtcaattactgaattattacaatctagaaaagttaattcattagaaatagttactttattagataaaccaaaccgtcgtaaagcggacattgaagctaagtatgtaggtaaaaaaataccagatgaatttgttgttggttacggtttagattatcgtgaattataccgaaacttaccatatatcggtacgttaaaacctgaagtgtattcaaattaattttttaatcaatttcagttattattactatgcgtttgagaaataatagtgtagactcaaaaatatgaaaaatgtatttcatatatatttaattttagacaagacatatgtcttgaaaagttgaaaaatatagagattgataaaactaatacgggtgtgaatgacattgatgttaagctcaattactagcttataaaacatgtcatatgttacaatttttgttagttttattatgggaagtaggaggaaatgacgcatgcagaaagcttttcgcaatgtgctagttatcgtaataataggcgttattatttttggtctattttcatatttaaacggtaatggaaatatgccgaaacagcttacatataatcaatttactgagaagttggaaaaaggtgaccttaaaactttagaaatccaaccacaacaaaatgtctatatggtaagtggtaaaacgaaaaatgatgaagactattcatcaactattttatataacaacgaaaaagaattacaaaaaattactgatgctgctaaaaagcaaaacggtgtaaaattaacgattaaagaagaagaaaaacaaagtgtctttgtgagtatactttcaacattaattccagttgtagtcatagcgttattatttattttcttcctaagccaagcacaaggtggcggtagtggcggtcgtatgatgaactttggtaaatctaaagcaaaaatgtacgataataataaacgtcgtgttcgtttctctgatgtagcaggggcagatgaagaaaaacaagaattaattgaaattgttgatttcttgaaagataataaaaaattcaaagaaatgggatctaggattcctaaaggtgtcttacttgttggacctccaggtactggtaaaacattacttgctagagcggttgcaggtgaagctggcgcaccattcttctctattagtggttcagactttgtagagatgtttgttggtgttggtgcgagccgtgttcgtgacttattcgataatgctaagaaaaacgcgccttgtatcatctttatcgatgagattgatgctgttggtcgtcaacgtggtgcaggtgttggtggcggtcatgatgaacgtgaacaaaccctaaaccaattattagttgaaatggatggtttcggtgaaaatgaaggtatcattatgatagctgctacaaaccgtcctgatatccttgacccagccttattacgtccaggtcgttttgatagacaaattcaagttggtcgtccagatgtgaaaggccgtgaagcaattcttcatgttcatgctaaaaacaaaccacttgatgaaacggttgatttaaaagcaatttcacaacgtacacctggtttctcaggtgctgatttagagaacttattaaatgaagcatctttaattgctgtacgtgaaggtaaaaagaaaattgacatgagagatatcgaagaggcaacggatagagttatagccggacctgctaagaaatctcgagttatttctaagaaagaacgtaatattgttgctcatcacgaagctggtcatacaattatcggtatggtacttgatgaggcagaagtagtgcataaagttactattgttccacgtggacaagcaggtggttatgcaatgatgctacctaaacaagatcgtttcttaatgactgaacaagagttattagataaaatctgtggtttacttggtggacgtgtatcagaagatattaactttaacgaagtatcaacaggtgcttcaaatgacttcgaacgtgcaacacaaatcgcacgctcaatggttacgcaatatggtatgagtaaaaaattaggaccattacagttcggtcatagcaatggtcaagtattcttaggtaaagatatgcaaggtgagcctaattattcaagccaaatcgcatatgaaattgataaagaagttcaacgaatcgttaaagaacaatacgaacgttgtaaacaaattttattagagcacaaagaacaattaattttaattgctgaaacattattaacagaagaaacattagttgctgaacaaattcaatcattattctacgaaggtaaattacctgaaattgattatgatgcagctaaagttgttaaagatgaagattctgaatttaatgatggtaaattcggtaaatcttatgaagagattcgtaaagagcaattagaagatggacaacgtgacgaaagtgaagatcgtaaagaagaaaaagatattgctgaggataaaaaagaagctgataaatctgatgaaaaagatgaaccagcacatcgacaagccccaaatatcgaaaaaccttacgatccaaatcacccagacaataaataatcgattatattcagtacctctttctatgataaagttatagaaagaggtacttttatcgtttttaaaaatacgtattagattttaagtcattgaattgttatagcagaaaataattgtaaaacaagttacttcattatttagaatgatgggtgtagaataagtacaattgttgcattttatgaagtaaagtaattttaaaatatagagtaatagaggagattgaaataatgacacacgattatattgttaaagcattagcatttgatggggagattagggcttatgctgctttgacaactgaaactgttcaagaagcacaaacgagacattatacatggccgacagcatctgctgcaatgggaagaacaatgacagcaacagctatgatgggcgcaatgttgaaaggtgatcaaaaattaactgtcactgtagatggccaaggacctattggacgaattattgccgatgcaaatgctaaaggcgaggtgcgtgcttatgtagaccatccacaaactcattttccattaaatgagcaaggtaaacttgatgtaagacgagcagtagggacaaatggatctattatagttgttaaagacgttggaatgaaagactatttctctggagcaagtccaattgtttcaggagaacttggtgaagattttacttattattatgctacaagtgaacaaacaccttcatcggtaggtcttggtgtattggtaaatcctgataatacgattaaagcagcaggaggatttatcattcaagttatgccaggtgccaaagatgaaacaatttcaaaattagaaaaagcaattagtgaaatgacaccagtttctaaattaattgaacaaggattaacgccagaaggattactaaacgaaatcttaggtgaagaccatgtgcaaattttagagaaaatgcctgttcaatttgaatgtaattgtagtcatgagaaatttttaaatgctattaaaggattgggcgaggctgagattcaaaatatgattaaagaagatcatggtgctgaagcagtatgtcatttctgtggaaataaatataaatatactgaagaagaattaaacgtgttgctagaaagtttagcgtaatttaatttaaatcaatacgctaaaatgtttatttttagcggtttagtgaaatgtagaactaaatagttgtataatccttagtgattttgtttgctttctagaatttatttgataaaataattctatatccgataaataaactaagatttcaacaactaactaaaaaggagtgttcttaatggcacaaaaaccagtagataatattactcaaattattggcggtacaccggtagtcaaattgagaaatgtagtagatgacaatgcagcagatgtttatgtaaaattggaatatcaaaatccaggtggttctgtaaaggatagaattgctttagcaatgattgaaaaagcagagcgagaaggcaaaattaaacctggcgacacaattgtagaaccaacaagtggtaatacaggtatcggtttagcatttgtatgtgctgctaaaggatataaagcagtatttactatgcccgaaacaatgagccaagagcgtcgtaatttattaaaagcatacggtgcggaattagttttaacgcctggatcagaagcgatgaaaggtgcaattaaaaaagctaaagaattaaaagaagaacatggttacttcgagccacaacaatttgaaaaccctgcgaaccctgaagttcatgagttaactacaggtcctgagttattacaacaatttgaagggaaaactatcgatgcgttcctagctggtgttggtactggtggtacgttatctggtgtaggtaaagttctgaaaaaagaatatcctaacatcgaaattgttgctatagagcctgaggcttctccagtattgagcggtggtgagccaggtccacataaattacaaggtttaggtgctggatttattccaggcactttgaatacagaaatctatgacagtattattaaagtaggaaatgatacagcgatggaaatgtctcgtcgagttgctaaagaggaaggtattttagcaggtatttcatcaggtgctgcgatttatgctgccattcaaaaagcaaaagaattaggaaaaggtaaaacagtagtaacagtattgccgagtaatggtgaacgctacttatcaacacctttatattcattcgatgactaattaatgtcatttaaaagagtgagttatctttttgagataacttgctctttttttctaccatgtataattttaaaaatatgagcgttaaattaaacatttttctgataaaaacatccagtgaatgataagataataaacgtacatattaataactagtaaatcgcaggagtaaattttattagagttaaacaatacataattaaagggtggttaacatgactaaaacaaaaattatgggcatattaaacgtcacacctgattcattctcagatggtggaaaatttaataatgttgaaacagctataaatagagtgaaagccatgatagatgaaggtgctgacattatagatgttggaggtgtttcaacgagacccggtcatgaaatggttacattagaagaagagctgaacagagtattacctgttgttgaagctattgtcggttttgatgtaaaaatttcagtcgatacatttcgaagtgaggttgctgaagcatgtttaaaattaggcgttgatatgattaatgatcaatgggcgggtctgtatgatcatcgtatgttccaaattgtagctaaatatgacgcggaaattattttaatgcataatggaaatggtaatcgtgatgaaccggttgtcgaagaaatgttaacatctttgttagcacaagcacatcaagctaaaatagctggtataccttcaaataaaatttggctagatccaggtataggtttcgctaaaactagaaatgaagaagccgaagttatggcaagactggatgaacttgttgcaacagaatatccagttttattagcgacaagccggaaacgtttcactaaagagatgatgggttatgatacaacaccggttgaaagagatgaagtaactgcagctacgactgcatatggtattatgaaaggcgttagagcagtacgcgttcataatgtcgagttgaatgctaaattagctaaaggtatagattttttaaaggagaatgaaaatgcaagacacaatctttcttaaaggtatgcgcttttatggatatcatggtgctttatcagctgaaaatgaaatagggcaaattttcaaagtggatgtaactttgaaagtagacttagctgaagctgggcgtactgataatgttattgatacagttcattatggtgaagtgttcgaagaggttaaatcaattatggaaggtaaggccgttaatttacttgagcatctagctgaacgtattgcaaatcgtataaattcacaatataatcgtgtaatggaaacaaaagtgagaatcactaaagaaaacccaccgattccgggtcattatgatggagtaggtatcgaaatagtgagggagaataaatgattcaagcatacttaggattaggtagtaatattggtgatagagaaagccagttaaacgatgctataaagattttgaatgaatatgatggtattagcgtatctaatatttctccgatttatgaaacagcaccagttgggtatactgagcaacctaactttttaaatttgtgtgttgaaattcaaacaacactcacagtattacaactgttggaatgttgtttgaagacagaagaatgtttacaccgtattagaaaggaacgatggggtcctagaactttagatgtggatattttgttgtatggagaagaaatgatagatttaccaaaactgtcggtgccacatccgagaatgaatgaacgtgcatttgttttaatcccattaaatgatatagcagcaaatgtcgtagaaccacgttcgaaattgaaagtgaaagatttagtttttgtcgatgacagtgtaaagagatataaataatgtattgttgagaacattcatatttattgggaatagatgattgattattggagatgtttccgcattttgattatctctaaatgcatttgattacgaattagtatatgatgatttagtatgtgttagaattaagttatttcataaaatcaaagtaagcaatatttgataaattgctgtaatttatttgggcttttgttgaagtttgtggaagataatttttatacatttacttagggttgtattaatgataatcgtattttaaatgaataagtaattcataaacgaaaacagaaattgctttattacatttacaagctcttgtaaaattaaaaaagtgataaaattgatgttatgaatataagaaaacatgccacatcataactttaaggtgtaatggttaatgataaagtattagaaacatcgaaagagatgtatgttgagcaaaaatgtctgatattttataaaactttaaaggaaaatgtttgagtgtaccagttggaatactaaaggattacaacaagttaaaggagagaaagttatgtcagaagaaatgaatgaccaaatgttggttcgacgtcaaaaattacaagaattatatgatcttggtatagacccgtttggttctaaatttgaccgttcaggtttatctagtgatttgaaagaagagtgggaccagtattctaaagaagaattggtagaaaaagaagcggatagtcatgtcgctatagctggacgattaatgactaagcgtggtaaaggtaaagcaggatttgcacacgttcaggacttagctggacaaattcaaatttacgttcgtaaagatcaagttggcgatgacgaatttgatttatggaaaaatgctgatttaggcgatatcgttggtgttgaaggtgtaatgttcaaaacaaatactggcgaattatcggttaaagcgaagaaattcacgctactaactaaatcattgcgaccattaccggataaattccacggtttacaggatattgaacagagatatcgtcaaagatatttagatttaattacgaacgaagatagcactcgtacatttattaatcgtagtaaaatcattcaagaaatgcgtaattatttaaataataaaggtttcttggaagtagaaacacctatgatgcaccaaattgctggtggcgcagctgctagaccatttgtaacacatcataatgcattagatgcaacgttatacatgcgtattgctattgagttgcatttaaaacgtttaattgtcggtggacttgaaaaagtatatgaaattggtagagtattccgtaatgaaggtgtatcaactagacataaccctgaattcacaatgattgaattatatgaagcatatgcagattatcatgacattatggatttaacagaatctatggtgagacatattgccaatgaagtattaggttctgcaaaagtacaatacaatggggaaacgattgatttagaatctgcttggactcgtttgcatattgttgatgctgtaaaagaagctactggtgtggatttttatgaagttaaaagtgatgaagaagctaaagctttagctaaagaacatggtattgaaattaaagatacaatgaaatatggtcatattttaaatgaattctttgagcaaaaagttgaagaaacacttattcagccaacgtttatctatggtcatccgactgaaatttcacctttagcgaagaaaaatcctgaagatcctagatttactgatcgtttcgaattgttcattgtaggtagagagcatgcaaatgcatttactgaattaaatgatcctattgatcaaaaaggtcgttttgaagcgcaacttgttgaaaaggcgcaaggtaatgatgaagcgcatgaaatggatgaagattacattgaagcgttagaatatggtatgcctccgacaggtggtcttggtatcggtattgacagattggttatgttattaactgattctccatcaatcagagacgtgttattattcccttatatgagacaaaaataaatgacgttgattgttagtaagagctctcgtgtatacaacatgtgtatgcgagggttttcttaattatggtaattagttcgtgtttgaatgtttttgatagtaatagttaacgatagtggtactatttttgactgttaaacaaggtagttggctgatagatgaaaatgacgatacgtatatagagtagttcggatgagaaatgttaacgatagacattgagatatcttataacaaaaattgctatattagtataatttatcttaatcagctataaaagtactttaaaattgtatagaatgtgtatggttttgtacatatgtgtatgatagaatactaaaagtgttatgaattagagagcacgagaaatgtcagttttgaagaataaaaaagttgattaaaagtgttgactttatcaattgaatgaagtaatatataaaagtcgtcaaaaacagacgaaacacactaaaagctgatgtgacaaagttcacaacaaagtgtaaaattaactattgcaccttattaattaagcgtgtatcataaataagtaagttattttgtctggtggctatagcaaggaggtcacacctgttcccatgccgaacacagaagttaagctccttagcgtcgatggtagtcgaacttacgttccgctagagtagaacgttgccaggcaaatgacaaatcggagaattagctcagctgggagagcatctgccttacaagcagagggtcggcggttcgaacccgtcattctccaccatttattcttagatatagccggcctagctcaattggtagagcaactgacttgtaatcagtaggttgggggttcaagtcctctggccggcaccatcttttgagccattagctcagctggtagagcatctgacttttaatcagagggtcagaggttcgaatcctctatggctcattacgatttaatttttatatttagcaaaataatgcagaagtagttcagcggtagaatacaaccttgccaaggttggggtcgcgggttcgaatcccgtcttctgctccattattttgccggggtggcggaactggcagacgcacaggacttaaaatcctgcggtgagagatcaccgtaccggttcgattccggtcctcggcaccattttagcgcccgtagctcaattggatagagcgtttgactacggatcaagaggttatgggttcgactcctatcgggcgcgccatttttaaattaattgaataacgggaagtagctcagcttggtagagcacttggtttgggaccaaggggtcgcaggttcgaatcctgtcttcccgattacttcttaaatttcattttatgggggcttagctcagctgggagagcgcctgctttgcacgcaggaggtcagcggttcgatcccgctagtctccaccatttatttttacacgatgaacattgaaaactgaatgacaatatgtcaacgttaattccaaaaaacgtaactataagttacaaacattatttagtatttatgagctaatcaaacatcataatttttatggagagtttgatcctggctcaggatgaacgctggcggcgtgcctaatacatgcaagtcgagcgaacggatgagaagcttgcttctctgatgttagcggcggacgggtgagtaacacgtggataacctacctataagactgggataacttcgggaaaccggagctaataccggataatattttgaaccgcatggttcaaaagtgaaagacggtcttgctgtcacttatagatggatccgcgctgcattagctagttggtaaggtaacggcttaccaaggcaacgatgcatagccgacctgagagggtgatcggccacactggaactgagacacggtccagactcctacgggaggcagcagtagggaatcttccgcaatgggcgaaagcctgacggagcaacgccgcgtgagtgatgaaggtcttcggatcgtaaaactctgttattagggaagaacatatgtgtaagtaactgtgcacatcttgacggtacctaatcagaaagccacggctaactacgtgccagcagccgcggtaatacgtaggtggcaagcgttatccggaattattgggcgtaaagcgcgcgtaggcggttttttaagtctgatgtgaaagcccacggctcaaccgtggagggtcattggaaactggaaaacttgagtgcagaagaggaaagtggaattccatgtgtagcggtgaaatgcgcagagatatggaggaacaccagtggcgaaggcgactttctggtctgtaactgacgctgatgtgcgaaagcgtggggatcaaacaggattagataccctggtagtccacgccgtaaacgatgagtgctaagtgttagggggtttccgccccttagtgctgcagctaacgcattaagcactccgcctggggagtacgaccgcaaggttgaaactcaaaggaattgacggggacccgcacaagcggtggagcatgtggtttaattcgaagcaacgcgaagaaccttaccaaatcttgacatcctttgacaactctagagatagagccttccccttcgggggacaaagtgacaggtggtgcatggttgtcgtcagctcgtgtcgtgagatgttgggttaagtcccgcaacgagcgcaacccttaagcttagttgccatcattaagttgggcactctaagttgactgccggtgacaaaccggaggaaggtggggatgacgtcaaatcatcatgccccttatgatttgggctacacacgtgctacaatggacaatacaaagggcagcgaaaccgcgaggtcaagcaaatcccataaagttgttctcagttcggattgtagtctgcaactcgactacatgaagctggaatcgctagtaatcgtagatcagcatgctacggtgaatacgttcccgggtcttgtacacaccgcccgtcacaccacgagagtttgtaacacccgaagccggtggagtaaccttttaggagctagccgtcgaaggtgggacaaatgattggggtgaagtcgtaacaaggtagccgtatcggaaggtgcggctggatcacctcctttctaaggatatattcggaacatcttcttcagaagatgcggaataacgtgacatattgtattcagttttgaatgtttatttaacattcaaaaaaatgggcctatagctcagctggttagagcgcacgcctgataagcgtgaggtcggtggttcgagtccacttaggcccaccattatttgtacattgaaaactagataagtaagtaaaatatagattttaccaagcaaaaccgagtgaataaagagttttaaataagcttgaattcataagaaataatcgctagtgttcgaaagaacactcacaagattaataacgcgtttcctgtaggatggaaacatagattaagttattaagggcgcacggtggatgccttggcactagaagccgatgaaggacgttactaacgacgatatgctttggggagctgtaagtaagctttgatccagagatttccgaatggggaaacccagcatgagttatgtcatgttatcgatatgtgaatacatagcatatcagaaggcacacccggagaactgaaacatcttagtacccggaggaagagaaagaaaattcgattcccttagtagcggcgagcgaaacgggaagagcccaaaccaaaaagcttgcttgttggggttgtaggacactctatacggagttacaaaggacgacattagacgaatcatctggaaagatgaatcaaagaaggtaataatcctgtagtcgaaaatgttgtctctcttgagtggatcctgagtacgacggagcacgtgaaattccgtcggaatctgggaggaccatctcctaaggctaaatactctctagtgaccgatagtgaaccagtaccgtgagggaaaggtgaaaagcaccccggaaggggagtgaaatagaacctgaaaccgtgtgcttacaagtagtcagagcccgttaatgggtgatggcgtgccttttgtagaatgaaccggcgagttacgatttgatgcaaggttaagcagtaaatgtggagccgtagcgaaagcgagtctgaatagggcgtttagtatttggtcgtagacccgaaaccaggtgatctacccttggtcaggttgaagttcaggtaacactgaatggaggaccgaaccgacttacgttgaaaagtgagcggatgaactgagggtagcggagaaattccaatcgaacctggagatagctggttctctccgaaatagctttagggctagcctcaagtgatgattattggaggtagagcactgtttggacgaggggcccctctcgggttaccgaattcagacaaactccgaatgccaattaatttaacttgggagtcagaacatgggtgataaggtccgtgttcgaaagggaaacagcccagaccaccagctaaggtcccaaaatatatgttaagtggaaaaggatgtggcgttgcccagacaactaggatgttggcttagaagcagccatcatttaaagagtgcgtaatagctcactagtcgagtgacactgcgccgaaaatgtaccggggctaaacatattaccgaagctgtggattgtcctttggacaatggtaggagagcgttctaagggcgttgaagcatgatcgtaaggacatgtggagcgcttagaagtgagaatgccggtgtgagtagcgaaagacgggtgagaatcccgtccaccgattgactaaggtttccagaggaaggctcgtccgctctgggttagtcgggtcctaagctgaggccgacaggcgtaggcgatggataacaggttgatattcctgtaccacctataatcgttttaatcgatggggggacgcagtaggataggcgaagcgtgcgattggattgcacgtctaagcagtaaggctgagtattaggcaaatccggtactcgttaaggctgagctgtgatggggagaagacattgagtcttcgagtcgttgatttcacactgccgagaaaagcctctagatagaaaataggtgcccgtaccgcaaaccgacacaggtagtcaagatgagaattctaaggtgagcgagcgaactctcgttaaggaactcggcaaaatgaccccgtaacttcgggagaaggggtgctctttagggttaacgcccagaagagccgcagtgaataggcccaagcgactgtttatcaaaaacacaggtctctgctaaaccgtaaggtgatgtataggggctgacgcctgcccggtgctggaaggttaagaggagtggttagcttctgcgaagctacgaatcgaagccccagtaaacggcggccgtaactataacggtcctaaggtagcgaaattccttgtcgggtaagttccgacccgcacgaaaggcgtaacgatttgggcactgtctcaacgagagactcggtgaaatcatagtacctgtgaagatgcaggttacccgcgacaggacggaaagaccccgtggagctttactgtagcctgatattgaaattcggcacagcttgtacaggataggtaggagcctttgaaacgtgagcgctagcttacgtggaggcgctggtgggatactaccctagctgtgttggctttctaacccgcaccacttatcgtggtgggagacagtgtcaggcgggcagtttgactggggcggtcgcctcctaaaaggtaacggaggcgctcaaaggttccctcagaatggttggaaatcattcatagagtgtaaaggcataagggagcttgactgcgagacctacaagtcgagcagggtcgaaagacggacttagtgatccggtggttccgcatggaagggccatcgctcaacggataaaagctaccccggggataacaggcttatctcccccaagagttcacatcgacggggaggtttggcacctcgatgtcggctcatcgcatcctggggctgtagtcggtcccaagggttgggctgttcgcccattaaagcggtacgcgagctgggttcagaacgtcgtgagacagttcggtccctatccgtcgtgggcgtaggaaatttgagaggagctgtccttagtacgagaggaccgggatggacatacctctggtgtaccagttgtcgtgccaacggcatagctgggtagctatgtgtggacgggataagtgctgaaagcatctaagcatgaagcccccctcaagatgagatttcccaacttcggttataagatccctcaaagatgatgaggttaataggttcgaggtggaagcatggtgacatgtggagctgacgaatactaatcgatcgaagacttaatcaaaataaatgttttgcgaagcaaaatcacttttacttactatctagttttgaatgtataaattacattcatatgtctggtgactatagcaaggaggtcacacctgttcccatgccgaacacagaagttaagctccttagcgtcgatggtagtcgaacttacgttccgctagagtagaacgttgccaggcaaaaaatggatgcgatgagccgcattgagaccgcaaggtctcttttttttatgtctaaaacgtcaaaataaaagttaacacaaagaaaatggcttgacgaagtgaaaacgtttgaatctgacgaaacgagaaaagagcgcaacgagtttagtagagctaaatgagtaagcgagagccgaagaagaggaaagaagcaagcgattgtcacaagtcaagaaaggttcttagcgaggatggtagccaacttacgttccgctagagtagaactggaaatgataatttaataatgtacactttcgattgtctaagtatgtacaactttaattttgtgtttatataaatttaaaatgatatcatcgaaaacaaaatattgtataaatagagaagagcagtaagacggtatctaattgaaaatgatcttactgctcttttatatactttattgaaatacaaaaaggaaattaattattatacaatagacaagctattgcataagtaacactaacttttatcaaagaagtgttactttataattaatgattttattagagcgtctacatgcggttttaaagcatcatcgtctataccgccaaagcctaatataaatttaggggttttcttatagtcttgatcatcatcaaaattataaacttgtaattttaactttactttgtttgctctatcaagacactcttgtaatgttaatccattttttactgtaattgtaaaatgcatacccgtttcagcaccttgaatatcaagctgctctttgtaaggtttcaatctttttaaaatataggttagttttctacgataaattcgtctcattttatttaaatgcctttcaaaaccaccggaagatataaacgttgcaataaggttttgcatatgaacaggtacagtgttgccttcaatgtgattttgagaatgatattttttcattatagaatagggtaacaccatatatgcaactcgacagctaggaaaaatagactttgaaaatgtactgatataaatcactttttctcctcttgaatatagaccttgaattgctggaatgggtttgccgaaatatctaaactcggaatcataatcatcttctataataaatcgttcttctttttcttgagcccattgtattaattgagttcgtttttttaagtccatcacatatccagttggaaattgatgggaaggcgttatatatactatatttttttgtgatttaataacttcatctacgtttattccattatcttcaacttcaatttgttcatattcaacttgttttttatctaaaatatttttgattggtggataactaggtttttcgataataaacgttgaagtataaagtaaatcgactaattgatttactaattgttcggtagatgagccaattataatttgattaggatcacaaattacaccacgattagtaaataaataaaatgccagttgaaatcttaaatgtaattctccttgaaaatgtcctctacgtaattgatttaaatgatttgtatcataaagatctttggaatactttctgaaaagttctatagggaaatgtttcgtatctatttcatccaaattaaaagcataatcataagcttcatcactcgcttttggtttatatgaatcatcatcaaaaagagaggggataggttgattgtttaaaattgttaaagattcaatttcggacacaaaatatccagagcgaggtcttgaataaatgtaaccttcgtctaatagaagttgatatgcatgctctacggttgtttggctgatagataaatgtttgcttaattgtcttttagaataaaatttatcgccttctttaaattgaccttcaattatttgtttttttaatttttcataaagttgatggtataaagtgtttttcaattttataactgacctcctaaatttatcttattttgtacctttttaaatatcagtttatacattacaatgtatttaatcaacttgaaaaggggttttatgtataatgagtaaaattattggatcagacagagtcaaaagaggtatggctgaaatgcaaaaaggcggcgttattatggatgtcgttaatgctgagcaagcaagaattgcagaagaagcaggcgcggtagcagttatggcattagaacgagtaccttctgatattagagctgctggtggcgttgcacgtatggcaaaccctaaaattgtagaagaagtaatgaatgctgtttctattccagtcatggctaaagcacgtattggtcatatcactgaagcaagagtattagaggcgatgggtgttgactatattgatgaatcagaagtgttaacaccagcagatgaggaatatcacttaagaaaagatcaatttacagtaccatttgtatgtggatgtcgtaatttaggtgaagctgcgcgtagaattggtgaaggtgctgctatgttacgtactaaaggtgaaccaggtacaggtaatattgttgaagctgtaagacatatgagacaagttaattcagaagttagtcgattgactgtaatgaatgatgatgagattatgacttttgcgaaagatatcggtgcgccttatgaaattttaaaacaaattaaagacaatggtcgtttaccggtagttaactttgcagctggtggcgttgcgactcctcaagatgctgctttaatgatggaattaggtgctgacggtgtattcgttggatcaggtatttttaaatcagaagatccagaaaaatttgctaaagcaattgttcaagcaacaacacattaccaagactatgaactaattggaagattagcaagtgaacttggcactgctatgaaaggtttagatatcaatcaattatcattagaagaacgtatgcaagagcgtggttggtaagatatgaaaataggtgtattagcattacaaggtgcagtacgtgaacatattagacatattgaattaagtggtcatgaaggtattgcagttaaaaaagttgaacaattagaagaaatcgagggcttaatattacctggtggcgagtctacaacgttacgtcgattaatgaatttatatggatttaaagaggctttacaaaattcaactttacctatgtttggtacatgcgcaggattaatagttctagcgcaagatatagttggtgaagaaggataccttaacaagttgaatattactgtacaacgaaactcattcggtagacaagttgacagctttgaaacagaattagatattaaaggtatcgctacagatattgaaggtgtctttataagagcgccacatattgaaaaagtaggtcaaggcgtagatatcctatgtaaggttaatgagaaaattgtagctgtccagcaaggtaaatatttaggcgtatcattccatcctgaattaacagatgactatagagtaactgattactttattaatcatattgtaaaaaaagcatagcttaatgtatgctaaatcaacgaattattgatatttatagatttgttgagaagaaaatatctccttcaaacttagctttggaggagttattttttatgtcaaaattaaaaatgataaaaaataaagatatacataagaaaaaaccccttcaaagagactgagaatagtcaaaattttgaagggattaattcgatgttgatgtatttgttaaataaagaatccagcgattgcagctgaaatgaaagatactagtgttgcaccgaataataatttcaaaccaaagcgggcaactgtatctccttttttgtcattaagtgatttaatagcacctgaaataataccaatagagctaaagttagcaaatgatactaagaatacagatgtaacaccttttgcgtgttcagataaatcactaagtttaccaagtgcttgcattgctacaaattcgttagataatagttttgtcgccataactgaaccggcttgaactgcatcttgccatggcacaccgactaagaatgcaaatggtgcaaagacaaaaccaattaatgtttggaaatcccaagaaatagcgccacctgaaactgtactaaagatattgcttacaattccatttaatagagcgataatggcaatgtatccgattaacattgcacctacaatgacagctactttaaatccatctaaaatatattctcctagcatttcgaagaatgattgttgtctttcttcagtttcttcaactaataatttgtcatcttcttcattaactttataagggttaataattgaagcgatgatgaaaccaccaaataagtttaagacaacagccgttacaacatatttaggttcaattaaggtaaagtatgcaccgataattgaagcagaaacagtcgacattgctgaagctgttaatgtgtataaacgttgcttaggtatgtatggtaattgttttttaattgaaataaatacttcagattgtcctaaaattgctgcagcaactgcattgtatgattctaaacgtcccataccattaattttagaaattaagaatcctaaaacattaatgattaaaggtaaaatctttgtgtattgaaggataccgataatcgctgaaataaatacgataggtaataatacactgaagaagaatggtggttgcttaggatcgatatattgaataccaccgaatacaaagttaacaccatctgctgcttttaataataagtagttaaaaccgtttgaaataccaccaataaccttgattcccattgtagttttaagcaagataaatgcaaagataagctgaattgcaagtaaaattcctacatatttccagcgaatatttttcctgtctgagctaaatagaaacgcaagtgctaaaaagaagataattccgataatcccaattagaatatgcatatatttctcattcctttagttttttctacaatctatcatacaataaaatggaagggctaacatcataaatttttgaaaatataaaaacaaattaattgaaaaaggtcaaaataggtcatataatatagtcaaagaaggtcaaaaaggggtgatatacatgcacaatatgtctgacatcatagaacaatacatcaaacgtttatttgaagagtcgaatgaagatgtcgttgaaattcagagagcgaatatcgcacagcgttttgattgtgtaccatcacaattaaattatgtaatcaaaacacgattcactaatgaacatggttatgaaatcgaaagtaaacgtggtggtggtggttacatccgaatcactaaaattgaaaataaagatgcaacaggttatattaatcatttgcttcagctgattggaccttctatttctcaacaacaagcttattatattattgatgggcttttagataaaatgttaataaatgaacgtgaagctaaaatgattcaagcagttattgatagagaaacgctatcaatggatatggtttctagagatattattagagcaaatattttaaaacgtttgttaccagttataaattattactaaatgaaatgaggtgttgaagtgctttgtgaaaattgtcaacttaatgaagcggaattaaaagttaaagttacaagtaaaaataaaacagaagaaaaaatggtgtgtcaaacttgtgctgaggggcaccatccgtggaatcaagctaatgaacagcctgaatatcaagaacatcaagataatttcgaagaagcatttgttgttaagcaaattttacaacatttagctacgaaacatggcattaattttcaagaagtagcgtttaaagaagaaaaacgttgcccatcatgtcatatgactttgaaagatattgcacatgttggtaaatttgggtgtgctaattgttatgcaacatttaaagatgacatcattgatatcgcccgcagagttcaaggtggacaatttgagcacgttggaaagacaccacattcttcacataaaaagatagctttaaagcgaaaaatcgaagaaaagaatgaatatttgaaaaaacttattgaaatccaagattttgaggaagcagccattgttagagatgaaattaaagcactaaaagctgagagtgaggtgcaacatgatgacgcataatattcatgataatatcagccaatggatgaaaagtaatgaagaaacaccaattgttatgtcttctagaattcggttagcgcgtaatttagaaaatcatgtgcatccactaatgtatgctactgaaaatgatggatttagagttataaatgaggtacaagatgccttgccaaattttgaattaatgcgtcttgatcaaatggatcaacaaagtaaaatgaaaatggttgcaaagcatttgattagtcctgaactaataaaacaaccagcagccgcagtattagtgaatgatgatgaatctttaagtgtcatgataaatgaagaggaccatattcgtattcaagctatgggaactgacacgacattacaggctttatataatcaagcttcatcaattgatgatgaattagatcgaagccttgatataagttatgatgaacaacttggttatttaactacatgtcctaccaatataggtactggtatgagagcaagcgtgatgctacatttaccaggtctatctattatgaaaagaatgacacggattgctcaaaccattaatcgttttggatatacaatcagaggtatttacggtgaaggttcgcaagtttatggacatacttatcaagtatccaaccaacttacacttggtaaatctgagttagaaatcatagaaacattaacagaagttgttaatcaaatcattcatgatgaaaaacaaatacgacaaaagttagacacttataatcaattagaaacacaagaccgtgtttttcgctcgctaggtattttacaaaactgtagaatgataactatggaagaggcttcttatagattaagcgaagttaaacttggtatagatttaaattacattgaattacaaaactttaaatttaatgaattgatggtagctatacagtcaccatttttattagatgaagaagatgacaaatctgtaaaagaaaaacgagcagatatactaagagaacatataaagtaggaggtcattatttatgttatttggtagattaactgaacgtgcacagcgcgtattagcacatgcacaagaagaagcaattcgtttaaatcattcaaatataggaacagaacacctattattggggttaatgaaagaacctgaaggaattgctgcaaaagtattagaaagttttaatatcactgaagataaagtaattgaagaagttgaaaaattaatcggacatggtcaagatcatgttggtacattgcattatacacctagagctaaaaaagtcattgaattatcgatggatgaagctagaaaattacatcacaattttgttggaacggaacatattttattaggcttgattcgtgaaaatgaaggtgttgcagcaagagtttttgcaaatctagatttaaatattactaaagcacgtgcacaagttgtgaaagctttaggaaaccctgaaatgagtaataaaaatgcacaagctagtaagtcaaataatactccaactttagatagtttagctcgtgacttaacagtcattgccaaagacggtacattagatcctgttataggacgtgataaagaaattacacgtgtaattgaagtattaagtagacgtacgaaaaacaatcctgtacttattggagagccaggtgttggtaaaactgctattgctgaaggtttagcgcaagccatagtgaataatgaggtaccagagacattaaaagataagcgtgttatgtctttagatatgggaacagtagttgcaggtactaaatatcgtggtgaatttgaagagcgtctgaaaaaggttatggaagaaatccaacaagcaggtaatgtcatcctatttattgatgagttgcatactttagttggtgctggtggtgctgaaggtgctatcgatgcttcgaatattttgaaaccggcattagcacgtggtgaattacaatgtattggtgctactacattagatgaatatcgcaaaaatattgaaaaagacgcggctttagaacgtcgtttccaacctgtacaagttgatgaaccttcagtagtagatacagttgctattttaaaaggattaagagatcgttacgaagcacaccatcgtattaatatttcagacgaagctattgaagcagctgttaaattaagtaacagatacgtttcagatcgtttcttaccagataaagcaattgatttaattgatgaagcaagttctaaagtaagacttaagagtcatacgacacctaataatttaaaagaaattgaacaagaaattgaaaaagttaaaaatgaaaaagatgccgcagtacatgctcaagagtttgaaaatgctgctaacctgcgtgataaacaaacaaaacttgaaaagcaatatgaagaagctaaaaatgaatggaagaatgcacaaaatggcatgtcaacttcattgtcagaagaagatattgctgaagttattgcaggatggacaggtatcccattaactaaaatcaatgaaacagaatctgaaaaacttcttagtctagaagatacattacatgagagagttattgggcaaaaagatgctgttaattcaatcagtaaagcggttagacgtgcccgtgcagggttaaaagatcctaaacgaccaattggtagctttatcttccttggaccaactggtgttggtaaaactgaattagctagagctttagctgaatcaatgtttggcgatgatgatgcgatgatccgtgtagacatgagtgaatttatggaaaaacacgcagtgagccgattagttggtgctcctccaggatatgttggtcatgatgatggtggacaattaactgaaaaagttagacgtaaaccatattctgtaattttatttgatgaaattgaaaaagctcatccagatgtatttaatattctattacaagttttagatgatggacatttgacagatacaaaaggacgtacagttgatttcagaaatacaattatcataatgacatcaaacgttggggcacaagaattacaagatcaacgatttgctggattcggtggttcaagtgatggacaagattatgaaacaattcgaaaaacgatgttaaaagaattaaaaaattcattccgtccagaatttttaaaccgtgtagatgatatcattgtattccataaactaacaaaagaagaattaaaagaaattgtaacaatgatggttaataaattaacaaatcgattatctgaacaaaacataaatattattgttactgataaagcgaaagacaaaatcgcagaagaaggatatgatccagaatatggtgcaagaccattaattagagcgatacaaaaaactatcgaagataatttaagtgaattaatattagatggtaatcaaattgaaggtaagaaagttacagtagatcatgatggtaaagagtttaaatatgacattgctgaacaaacttcagaaactaaaacaccatcgcaagcataattataaaacagtccaaaacaaattaaagttttgggctgtttttttagtagcattgaactatagaaattcgtgaaagtatccatcaacgaaacaatctaataaaacaatcatcaaaggatagttaagaattatatgtaacaagttaatgagcctacagcgatagcataaaggtatgaatttttataaaggttttttgtttgaagatactagcaacttacgtcaaaataaaataggtctatataatattgtgataaatctagagaaaagagtttactaagaaattattaagattttatctttgaaagataccgactatcaacatgatgtaagtttattttataatattcataaaaaataaatctggtaaaacagtttgcgttagtagtcatgttaaaatacaaacaaatgtaactcacatttaatttgtcataatgggaatgtgcgtttaaaatagatttgttcaaaggaaagtggaggtgcaattttggccaagaaaaaagtgatttttgaatgtatggcttgtggttatcaatctcctaaatggatggggaaatgtcctaattgtggcgcttggaatcaaatggaggaaattgttgaaaaagcagccaatcctaaacatggagttaaaaccaaggaattagcaggtaaagtacaaaaattaaatagtattaaacatgaaacaacgccgagagtgttaacagattcagcagaattcaaccgtgtattaggtggaggtattgtgagcggatcgttagtacttattggtggggatccaggtattggtaagtcaacgttacttttacaaatttgtgcatcgttatctcaaaagaaaaaagtactatatattactggagaagaatcgcttagtcagactaaattacgtgcagagcgattagatgaagattcaagtgaattgcaagtattagctgaaacagatcttgaagttatttatcaaacagtaaaagaagaacaacctgatttattagtagtggattcgattcaaacaatatatcatcctgaaatcagctctgcgccaggttctgtttcacaagttcgtgaaagtacacaaagtttaatgaatattgctaaacaaatgaacattgcaacttttatagtgggtcatgtaacgaaagaaggtcaaattgctggcccaagattgctagaacacatggttgatactgtgctttattttgaaggcgatgaacaccacgcatatcgaattttgcgagctgttaaaaaccgttttggttcaacgaatgaaatgggaatcttcgaaatgaagcaaagtggattaaaaggtgtaaataatccatctgaaatgtttttagaagaacgttcaacaaatgttccaggttcaacaattgttgcaaccatggagggaaccagaccacttttaatagaagttcaagcgctggtaactccaacgacttttaacaatccgagacgaatggcaacagggattgatcataatcgattaagtttgttgatggctgttttggaaaagaaagaaaattatctattacaacaacaagatgcttatatcaaagtagctggcggtgtaaagttaacggagccagcagttgatttaagtgtaattgtagcaactgcatctagctttaaagataaagctgtcgacggattagattgctatattggagaagttggtttaacgggtgaggtacgtcgtgtatctcggatagaacaacgcgtgcaagaggctgcaaaactaggtttcaaacgtgtaattattcctaaaaataatataggcggatggacatatcctgaaggtatacaagtaataggtgtaactactgtacatgaagcattgtcatttgctcttcattcataaaacatcaagaaaggaggacattgtgtgaatatcgttaaactaatggttattattatttacttaattattgggagcgcattaggaataattattattcctgaaattgcaaatgatcttggattacaaaactccagctttttaaaaaatcactatgtagatggcattatcggtagtatttttatgttcttaatttttggtgtatttattagacgagttactaacgctataaaaggtttagaacattttattatgcgtagaagtgctgttgaaatactattcgcaacaataggtttaataatcggattacttatttctgttatggtgtcgtttatattagaatcaattggtaactctatttttaatcatttcattcctgtcataattacgatattactatgttatttcggtttccaatttggccttaaaaaacgagatgaaatgttaatgtttttacctgagaatatagcgcgttccatgtcacaacatactaaaagtgctacgccaaaaattatcgacacaagcgcaattattgatggtcgtattttagaagtcattcgttgcggttttatcgatggcaatattttaattccgcaaggtgttattaatgaattacaaattgttgcagattcaaatgacagtgttaaacgtgaaaagggtaaaagaggcttagatattttaaatgaattgtatgatttagattatcctacaaaggttatacatccaactaaaacacatagtgatattgatacaatgctattaaagctagctaaacaatatcatgcaagtattattacgacagatttcaacctaaataaagtttgtcatgtacatggtatcaaagcattaaatgttaatgatttatcagaagcaatcaaacctaatgtacatcaaggtgatcaactgcatattttactgacaaaaatgggtaaagagcctggtcaggcagtaggatatctagatgatggtacgatggtagttgttgataatgctaaaaatcttattggcagtcatgtcaatttagaagtagtcagcttattgcaaacatcttcaggaagaattgtttttgctaaaaaaatcgaagatacagtatcattataaaaactgtagttgacgaaaacaaaatagatattaaaaggtatatgaaatggcgaagtttgtaatttgaagtataactataaataaatgcaaaacatatcagttatcaaaaaatacaaatagtgctaatatatcattgaaacaagttcattaagtgttaaattttagatattaataaagttattcttatagcaatcaagacatacaaaattagaatcaattttaacgtatttgaatagttaatttgaagtttaattttacagtacataatattcatttttaagtcgttgaaatgcttatgtagtgcagtcttgattcttagggatagcttttttaaagtgttgaaaaaacaactgctttctatttaaaatttaagcatattacccagtgaattatgttatgattaaacaatgaaattattttaaggtcatgttaaaaagcattgtttcgttttaacaataagacgagttagacatttgttatgacggtcgaagatagcaaatgaataatttatatgaactaacttgaaaatctgatatttaatttaggagtgaaaaaaatgagcgatcgtataagagtaagatatgcaccaagtccaactggttatcttcatattggtaatgcaagaacagcattattcaattacttgtatgctaaacattacaacggagattttgtgattcgaattgaagatactgataaaaaacgtaatttagaagatggagaaacatcacaatttgataatcttaaatggttaggattagattgggatgagtctgtagataaagacaatggctacggaccatatcgtcaatctgaacgtcaacatatctaccaaccattaatagatcagttactagcagaagataaagcatataaatgctatatgacagaagaagaattagaagctgaacgtgaagcgcaaatcgctcgtggtgaaatgcctcgctatggtggtcaacatgcgcatttgactgaagaacaacgtcaacaatttgaagcagaaggacgccaaccatcaattcgtttccgagtacctcaaaaccaaacgtattcatttgatgatatggtaaaaggaaatatttcatttgattcaaatggtattggtgactgggttatcgtaaaaaaagatggcattccaacgtacaattttgcagtagctatagatgatcattacatgcaaatttcagatgtaattcgtggtgatgatcatatttcaaacacgcctaaacaaattatgatttatgaagcatttggctgggagccacctcgttttggtcatatgtcattaattgttaatgaagaacgtaaaaagttaagtaaacgtgatgggcaaattttacaatttattgagcaatatcgtgacttaggttatttacctgaagcgttatttaattttattgcgttattaggttggtctcctgaaggtgaagaagaaatcttttctaaagaagaatttatcaaaatctttgatgaaaagcgtttgtcaaaatcaccagcatttttcgataagcaaaaattagcatgggttaataaccaatatatgaaacaaaaagatactgaaacagtattccaattagcattacctcatttaattaaagcaaatttgattcctgaggtgccgtcagaagaggatttatcttggggacgcaaattaattgcgctttatcaaaaagaaatgagttatgccggtgaaattgtacctttatcagaaatgttctttaaagaaatgccagctcttggtgaagaagaacaacaagtgattaatggagagcaagtaccagagttaatgacgcacttattcagtaaattagaagcacttgaaccatttgaagcggctgaaattaaaaagacaattaaagaagttcaaaaagaaacaggaataaaaggcaagcaattatttatgcctattcgtgttgctgtaacaggccaaatgcatggtcctgaattaccaaatacaattgaagtacttggtaaagaaaaagtgctaaaccgtttaaaacaatataagtaatgaaatagacaagatcaaggtagtatatacttgaattttataacgtaaccacatatgataaagttgtattaacaaattacaacaatatgaataaagtattttatataaaacgaaggattagtaattaaatttatacgatgcagagagtgtacggttgctgtgagtacaacgtagaaattaatgaatgcaccttcgtaaaatgaattaaatatataatgagagtgatgagcattaagttgacttagtttccttgataatttggaagcgcccgcaatattattaatgttattcgctaaattcagagtggaaccgtgcggaagcgcctctaacaatacaatttgtatgttagtggtgcttttttgatatttaatttcgcaggtacttcaattatgtatttacgtagttcaatcattgaggaggaaatgatcttgttaaaaagaatgagagacgatataaaaatggtatttgagcaggatccagcggcacgttcaacattagaagtcattacaacgtatgcaggtttacatgcagtttggagtcatttgattgcacataagttatacaaccaaaaaaaatatgttgcagcacgcgcgatatctcaaatttcaagatttttcacaggtatagaaatccatccaggtgctaaaattggaaagcgtctatttatagatcatggtatgggcgttgtaataggagaaacatgtacaattggtgataatgtgacaatctatcaaggcgtgacacttggtgggacagggaaagaaagagggaaaagacacccagatataggagacaatgttttaatagcagccggtgcgaaagttttaggaaatattaaaataaattcaaatgtaaatattggtgcaaattcagttgttttacaatcagttccaagttattcaacggttgttggtataccaggacatattgttaagcaagatggtgttcgagttggaaaaacatttgatcatcgccatctacctgatccaatttatgaacaaattaagcatttagaacgacaacttgaaaagactaggaatggagagattcaagatgattacattatataatacgcttacacgtcaaaaagaagtgttcaagcctatagaaccagggaaagtaaaaatgtatgtatgtggtcctactgtatataactacattcatattggtaacgcaagaccagcaattaattatgacgtagtgagacgttactttgaataccaaggatataatgtagaatatgtatcaaattttacagacgtagatgataaattaattaaacgttctcaagaattaaatcagtctgttcccgaaattgcagaaaaatatatcgctgcttttcatgaagatgttggtgcgttaaatgttagaaaagcgacttcaaatccaagggtaatggaccatatggatgacattattcaatttattaaagatttggtggatcaaggttatgcatatgaaagtggtggcgatgtttactttagaacacgtaaatttgaaggttatggtaaattaagtcatcaatccatagatgacttaaaagtgggtgctcgtatagatgcaggagagcataaagaagatgcacttgattttacattgtggaaaaaagcgaagcctggcgagattagttggaatagcccatttggtgaaggtagaccaggatggcatatagaatgttctgtaatggcatttcatgagctaggacctacaattgatatacatgcgggtggttcagatttacaatttccacatcatgaaaatgaaatagcacaatcagaagcacataatcatgcgccatttgctaattattggatgcataatggtttcattaatattgataatgaaaaaatgagtaaatcactaggcaactttattttagttcacgatattattaaagaagttgatccagatgtactaagattctttatgattagcgtacattatagaagcccaattaactataatctagaattggtagaatcagcacgtagtggactagagcgtattcgcaatagttatcaattaattgaagagcgcgcacaaattgctactaatattgaaaatcaacagacatatattgatcaaattgatgcgattttaaatcgttttgaaacagttatgaatgatgattttaatacagctaatgcaattacagcttggtatgatttagcaaaacttgcgaataaatatgtactagagaacacaacatcaacagaagtaattgataaatttaaagcagtttatcaaattttcagcgatgttttaggtgtaccgttaaaatctaaaaatgcagatgaattattggatgaagatgttgaaaaattaatcgaagagcgtaatgaagcaaggaaaaacaaagattttgcacgagcagatgagattcgagacatgctgaaatcacaaaacattatattagaagacacacctcaaggggttagatttaaacgtggataatcaacaagataatcacattaaattattgaatccattgaccttagcatatatgggagacgcagtcttagatcaatatgtacgtacctatatcgttttaaagcttaaaagtaagcctaataaactacatcaaatgtctaaaaaatatgtatctgccaaaagtcaggcgcaaacgttagaatatttaatggagcaagaatggtttacagacgaagaaatggatattttgaagcgagggcgtaacgcgaaaagtcatactaaagctaaaaacactgatgttcaaacatatcgtaaaagttcagcgatagaagcagtgataggttttctttatttagaaaaaagagaagaacgattagaggcattattaaataaaataataacaatagtaaacgaaaggtagtgacgatgtggaagatacggttattgttggtaggcatgctgttagagaagcgattattactgggcatccgataaataagatattgattcaagaaggtattaaaaagcaacaaattaatgaaattttaaaaaatgcaaaagatcaaaaaattattgttcaaactgtaccaaaatctaaattagattttttagcaaatgcaccacatcagggtgttgcagcgcttattgcaccatatgaatatgctgacttcgatcaatttttaaaacagcaaaaagaaaaagaaggtttatcgacagtacttatattagacggcttagaagacccgcataacttgggatcaattttaagaacagccgatgcaacgggagttgatggtgttattattcctaaacgtcgttcagttacactaacgcaaacagttgcaaaagcctcaacaggtgcaattgaacatgtaccagttattcgagtgacaaatttagctaaaactatcgatgaactaaaagataatggcttttgggtagctggcactgaagctaataatgcaacagattatagaaatctagaagcggacatgtcattggctattgtaattggtagcgaaggacagggtatgagtcgcctagtaagtgataaatgcgatttttatattaagattccaatggttggacatgtaaacagtttgaatgcttcggttgcagcaagtttaatgatgtacgaagtatttcgaaaaagacatgatgttggagaaatataatgaaagaacgttacttaatcattgatggatacaatatgataggacaatcaccaacgctaagcgccattgcaaaagagaatttagaagaagctagaatgcaattaatagatgcaattgcaaattataatgcagttatttcagatgaaattatttgtgttttcgatgcttatgaccaatcgggtgttgaaagagaatacatgtatcatggcgttaaaacgatttttaccaaggaaaaagaaacagctgatagtttcatagaacgttatgtttatgaactttatgacaagcatactaagcatattgcagttgtaacaagtgatatgagtgagcaacatgctatctttggatcaggtgcatatagaatatcatctcgcgaaatgtggagagatttaaaagaaaatgaaattgatgtgagtaaatcattagatgatataagtgaaaacaagccaagaactcgaattccgttatcttctgaaatccttgcagaatttgaaaaaatacgaagaggacatcataagaaatgacatttccgtcatcttgaaattttgaatgtaacaatattaaactaaccttaaattttagatagaaggggttagtttaatacttgaaatatgatttgacaactcaagacagtacaatcaaacgtaacaattcaataaatgataaagacttcgaaaagttagtaatggatctacaaccattaattattcgacgcatcaaaacatttggatttaatcattatgatttagaagacttatatcaagaaatacttatacggatgtataggtcggtccaaacatttgattttagtggagagcagcctttcacaaattatgttcaatgtttaattacgtctgtaaagtatgattatttgagaaaatatttagctacaaataaaagaatggataatttgattaatgaatatagagttacgtatccatgtgcaataaagcgttttgatgttgaaaacaattatttgaataaattagcaattaaagagttgatttgtcagtttaagtatttgagtgcatttgaaaaagatgtcatgtatttaatgtgtgaacaatataagccgagagaaattgctcaattgatgcatgtaaaagagaaagtgatttataatgccatacaacgatgtaaaaataaaataaaacgttatttcaaaatgatttgaaaagcgccttaggacgtgaattgaattataacgtgttacttactgatggtttgacatttgttataaattttatgtatagtatactggtattataatgaataaaggtgaattattgtgagaaaaatacctttaaattgtgaagcttgtggcaatagaaattataatgttcctaagcaagaaggctcggcaacaagattaaccttaaagaaatattgtccaaaatgtaacgcgcacacaattcataaagaatcgaaataaatacattcgaaataatactttgataatatgttcaaaggatttggaggttgagcagatggctaaaaaagaaagtttctttaaaggcgttaagtctgaaatggaaaaaacaagttggccgacgaaagaagagctatttaaatatactgtaattgtagtttctactgttatattcttcttagtctttttctatgccttagatttaggaattacagcattgaaaaatttattatttggttagaggagtgaagacatgtctgaagaagttggcgcaaagcgttggtatgcagtgcatacatattctggatatgaaaataaagttaaaaagaatttagaaaaaagagtagaatctatgaatatgactgaacaaatctttagagtagtcataccggaagaagaagaaactcaagtaaaagatggcaaagctaaaacgactgttaaaaaaacattccctggatatgttttagtggaattaatcatgacagatgaatcatggtatgtggtaagaaatacaccaggcgttactggttttgtaggttctgcaggtgcagggtctaagccaaatccattgttaccagaagaagttcgcttcatcttaaaacaaatgggtcttaaagaaaagactatcgatgttgaactcgaagttggcgagcaagttcgtattaaatcaggtccatttgcgaatcaagttggtgaagttcaagaaattgaaacagataagtttaagctaacagtattagtagatatgtttggccgagaaacaccagtagaagttgaattcgatcaaatagaaaagctttaattaacaattaaagttattaaactaaccaaaagataaaaaagagtattgattttttaattagaaaagtgttaaaattatgtggtcgcgcttttagagcgcccatttcgtcacgaaatgttaagagtgggagggcaaaactgagccctgtgaccacatcacgatatcaaggaggtgcacatcgtggctaaaaaagtagataaagttgttaaattacaaattcctgcaggtaaagcgaatccagcaccaccagttggtccagcattaggtcaagcaggtgtgaacatcatgggattctgtaaagagttcaatgcacgtactcaagatcaagcaggtttaattattccggtagaaatcagtgtttatgaagatcgttcatttacatttattacaaaaactccaccggctccagtattacttaaaaaagcagctggtattgaaaaaggttcaggcgaaccaaacaaaactaaagttgctacagtaactaaagatcaagtacgcgaaattgctaacagcaaaatgcaagacttaaacgctgctgacgaagaagcagctatgcgtattatcgaaggtactgcacgtagtatgggtatcgttgtagaataattttacgaatattaaatttgattacatgatttaaacgatgaagcagataacagagataataatgatgaattataaatataatctgaatgactagattaatgattgatttattcataagattaattcttctgttgtctgctcttaacttgcatatagcaagtaatgtgggaggaaattccgctaaaaccactaaaggaggaactataaatggctaaaaaaggtaaaaagtatcaagaagcagctagtaaagttgaccgtactcagcactacagtgttgaagaagcaattaaattagctaaagaaacaagcattgctaactttgacgcttctgttgaagttgcattccgtttaggaattgatacacgtaaaaatgaccaacaaatccgtggtgcagttgtattaccaaacggaactggtaaatcacaaagtgtattagtattcgctaaaggtgacaaaattgctgaagctgaagcagcaggtgctgactatgtaggtgaagcagaatacgttcaaaaaatccaacaaggttggttcgacttcgatgtagtagttgctacaccagacatgatgggtgaagttggtaaattaggtcgtgtattaggaccaaaaggtttaatgccaaaccctaaaactggaactgtaacaatggatgttaaaaaagctgttgaagaaatcaaagctggtaaagtagaatatcgtgctgaaaaagctggtatcgtacatgcatcaattggtaaagtttcatttactgatgaacaattaattgaaaacttcaatactttacaagatgtattagctaaagctaaaccatcatctgctaaaggtacatacttcaaatctgttgctgtaactacaacaatgggtcctggagttaaaattgatactgcaagtttcaaataataaatgatataaacaattacaggctgaaagaaatatctttcagtctgtaaaaatatattgacaataagtaatttccaagttatattacttattgtgattattttacctaagacagtaggagttatttataacttaaaatttatcctgccgaggctaaaattgacttgaacgtgatgatctatgatctttcaagcactttttgccgtgggtagaaagtgctttttttattaattttaaaaaaagcaccaaaaatttaaatggaggtgtctgaatgtctgctatcattgaagctaaaaaacaactagttgatgaaattgctgaggtactatcaaattcagtttcaacagtaatcgttgactatcgtggattaacagtagctgaagttactgacttacgttcacaattacgtgaagctggtgttgagtataaagtatacaaaaacactatggtacgtcgtgcagctgaaaaagctggtatcgaaggcttagatgaattcttaacaggtcctactgctattgcaacttcaagtgaagatgctgtagctgcagcgaaagtaatttctggatttgctaaagatcatgaagcattagaaattaaatcaggcgttatggaaggcaatgttattacagcagaagaagttaaaactgttggttcattaccttcacacgatggtcttgtatctatgcttttatcagtattacaagctcctgtacgcaacttcgcttatgcggttaaagctattggagaacaaaaagaagaaaacgctgaataatttttagcgtaaaaaaattaaaaataatggaggaattataaaatggctaatcatgaacaaatcattgaagcgattaaagaaatgtcagtattagaattaaacgacttagtaaaagcaattgaagaagaatttggtgtaactgcagctgctccagtagcagtagcaggtgcagctggtggcgctgacgctgcagcagaaaaaactgaatttgacgttgagttaacttcagctggttcatctaaaatcaaagttgttaaagctgttaaagaagcaactggtttaggattaaaagatgctaaagaattagtagacggagctcctaaagtaatcaaagaagctttacctaaagaagaagctgaaaaacttaaagaacaattagaagaagttggagctactgtagaattaaaataattcaagtatcttaaacttaataatcaaagttttatagcaagtattgctataatataatgattctttgagaagttaaaaccccgttattttgataacggggttttattcatttaaagactgagtgaaatgttataattataatgacgagttacaaagtgaagatgaggtggaataatgagtcattattacgatgaagatccaagtgtaattagcaatgaacaacgtattcaatatcaattaaaccatcataaaattgatttaataactgataacggagtgttttcgaaagataaagtagattatggttcagatgttcttgttcaaacttttttaaaagcgcatccacctggtccaagtaagcgaattgccgatgttggttgtggttacggaccaattggtttgatgattgctaaagtatcaccacatcattcaattacaatgctagatgttaatcacagagcgctagccttagttgaaaaaaacaaaaaattaaatggtattgataatgtgatcgtaaaggaaagtgatgctttgtctgctgtggaagacaaaagttttgattttattttaaccaatccaccaataagagcagggaaagaaaccgtgcatcgtatattcgagcaagcattacatagattagactcgaacggtgaactattcgttgtaattcagaagaagcaaggtatgccatctgcaaagaaaagaatgaatgaactttttggaaatgtagaagtggtaaataaagataaaggatattacattctgagaagtataaaagcttgaaatgaaatggatattctgttatagttatataatgtaaaaatttatgttcaataagtgtgtacttttacgttaaatagataagttaattaagaataaatatagaatcgaaaatggtgtcatcattagtgttgccgttttctttttgtctttttattaatatgcttatggtatttagctaaaagcggatcacataatttttgaggggtgaatctgtttggcaggtcaagttgtccaatatggaagacatcgtaaacgtagaaactacgcgagaatttcagaagtattagaattaccaaacttaatagaaattcaaactaaatcttacgagtggttcctaagagaaggtttaatcgaaatgtttagagacatttctccaattgaagattttactggtaatttgtcattagagtttgtggattaccgtttaggagaaccaaaatatgatttagaagaatctaaaaaccgtgatgctacttatgctgcacctcttcgtgtaaaagtgcgtctaatcattaaagaaacaggagaagttaaagaacaagaagtctttatgggtgatttcccattaatgactgatacaggtacgttcgttatcaatggtgcagaacgtgtaatcgtatctcaattagttcgttcaccatccgtttatttcaatgaaaaaatcgacaaaaatggtcgtgaaaactatgatgcaacaattattccaaaccgtggtgcatggttagaatatgaaacagatgctaaagatgttgtatacgtacgtattgatagaacacgtaaactaccattaacagtattgttacgtgcattaggtttctcaagtgaccaagaaattgttgaccttttaggtgacaatgaatatttacgtaatactttagagaaagacggcactgaaaacactgaacaagcgttattagaaatctatgaacgtttacgtccaggtgaaccaccaactgttgaaaatgctaaaagtctattgtattcacgtttctttgatccaaaacgctatgacttagcaagcgtgggtcgttataaaacaaacaaaaaattacatttaaaacatcgtttatttaatcaaaaattagctgagccaattgtaaatactgaaactggtgaaattgtagttgaagaaggtacagtgcttgatcgtcgtaaaatcgacgaaatcatggatgtacttgaatcaaatgcaaacagcgaagtgtttgaattgcatggtagcgttatagacgagccagtagaaattcaatcaattaaagtatatgttcctaacgatgatgaaggtcgtacgacaactgtaattggtaatgctttccctgactcagaagttaaatgcattacaccagcagatatcattgcttcaatgagttacttctttaacttattaagcggtattggatatacagatgatattgaccatttaggtaaccgtcgtttacgttctgtaggtgaattactacaaaaccaattccgtatcggtttatcaagaatggaaagagttgtacgtgaaagaatgtcaattcaagatactgagtctatcacacctcaacaattaattaatattcgacctgttattgcatctattaaagaattctttggtagctctcaattatcacaattcatggaccaagcaaacccattagctgagttaacgcataaacgtcgtctatcagcattaggacctggtggtttaacacgtgaacgtgctcaaatggaagtacgtgacgttcactactctcactatggccgtatgtgtccaattgaaacacctgagggaccaaacattggattgattaactcattatcaagttatgcacgtgtaaatgaattcggctttattgaaacaccatatcgtaaagttgatttagatacacatgctatcactgatcaaattgactatttaacagctgacgaagaagatagctatgttgtagcacaagcaaactctaaattagatgaaaatggtcgtttcatggatgatgaagttgtatgtcgtttccgtggtaacaatacagttatggctaaagaaaaaatggattatatggatgtatcgccgaagcaagttgtttcagcagcgacagcatgtattccattcttagaaaacgatgactcaaaccgtgcattgatgggtgcgaacatgcaacgtcaagcagtgcctttgatgaatccagaagcaccatttgttggaacaggtatggaacacgttgcagcacgtgattctggtgcagctattacagctaagcacagaggtcgtgttgaacatgttgaatctaatgaaattcttgtacgtcgtctagttgaagagaacggcgttgagcatgaaggtgaattagatcgctatccattagctaaatttaaacgttcaaactcaggtacatgttacaaccaacgtccaatcgttgcagttggagatgttgttgagtataacgagattttagcagatggaccatctatggaattaggagaaatggcattaggtagaaacgtagtagttggtttcatgacttgggacggttacaactatgaggatgccgttatcatgagtgaaagacttgtgaaagatgacgtgtatacttctattcatattgaagagtatgaatcagaagcacgtgatactaagttaggacctgaagaaatcacaagagatattcctaatgtttctgaaagtgcacttaagaacttagacgatcgtggtatcgtttatattggtgcagaagtaaaagatggagatattttagttggtaaagtaacgcctaaaggtgtaactgagttaactgccgaagaaagattgttacatgcaatctttggtgaaaaagcacgtgaagttagagatacttcattacgtgtacctcacggcgctggcggtatcgttcttgatgtaaaagtattcaatcgtgaagaaggcgacgatacattatcacctggtgtaaaccaattagtacgtgtatatatcgttcaaaaacgtaaaattcatgttggtgataagatgtgtggtcgacatggtaacaaaggtgtcatttctaagattgttcctgaagaagatatgccttacttaccagatggacgtccgatcgatatcatgttaaatcctcttggtgtaccatctcgtatgaacatcggacaagtattagagctacacttaggtatggctgctaaaaatcttggtattcacgttgcatcaccagtatttgacggtgcaaacgatgacgatgtatggtcaacaattgaagaagctggtatggctcgtgatggtaaaactgtactttatgatggacgtacaggtgaaccattcgataaccgtatttcagtaggtgtaatgtacatgttgaaacttgcgcacatggttgatgataaattacatgcgcgttcaacaggaccatattcacttgttacacaacaaccacttggcggtaaagcgcaattcggtggacaacgtttcggtgagatggaggtatgggcacttgaagcatatggtgctgcatacacattacaagaaatcttaacttacaaatccgatgatacagtaggacgtgtgaaaacatacgaggctattgttaaaggtgaaaacatctctagaccaagtgttccagaatcattccgagtattgatgaaagaattacaaagtttaggtttagatgtaaaagttatggatgagcaagataatgaaatcgaaatgacagacgttgatgacgatgatgttgtagaacgcaaagtagatttacaacaaaatgatgctcctgaaacacaaaaagaagttactgattaatacgcaatttacaaaacaggcaaaaagatactaagctgaattttattgatgattcagtttagtactttaagccattttaaataaatgcaaatcaatcaaatagcacagctaatctaaattgaaggaggtaggctccttgattgatgtaaataatttccattatatgaaaataggattggcttcacctgaaaaaatccgttcttggtcttttggtgaagttaaaaaacctgaaacaatcaactaccgtacattaaaacctgaaaaagatggtctattctgtgaaagaattttcggacctacaaaagactgggaatgtagttgtggtaaatacaaacgtgttcgctacaaaggcatggtctgtgacagatgtggagttgaagtaactaaatctaaagtacgtcgtgaaagaatgggtcacattgaacttgctgctccagtttctcacatttggtatttcaaaggtataccaagtcgtatgggattattacttgacatgtcaccaagagcattagaagaggttatttactttgcttcttatgttgttgtagatccaggtccaactggtttagaaaagaaaactttattatctgaagctgaattcagagattattatgataaatacccaggtcaattcgttgcaaaaatgggtgcagaaggtattaaagatttacttgaagagattgatcttgacgaagaacttaaattgttacgcgatgagttggaatcagctactggtcaaagacttactcgtgcaattaaacgtttagaagttgttgaatcattccgtaattcaggtaacaaaccttcatggatgattttagatgtacttccaatcatcccaccagaaattcgtccaatggttcaattagatggtggacgatttgcaacaagtgacttaaacgacttataccgtcgtgtaattaatcgaaataatcgtttgaaacgtttattagatttaggtgcacctggtatcatcgttcaaaacgaaaaacgtatgttacaagaagccgttgacgctttaattgataatggtcgtcgtggtcgtccagttactggcccaggtaaccgtccattaaaatctttatctcatatgttaaaaggtaaacaaggtcgtttccgtcaaaacttacttggtaaacgtgtcgactattcaggacgttcagttattgcagtaggtccaagcttgaaaatgtaccaatgtggtttaccaaaagaaatggcacttgaactatttaaaccattcgtaatgaaagaattagttcaacgtgaaattgcaactaacattaaaaatgcgaagagtaaaatcgaacgtatggatgatgaagtttgggacgtattggaagaagtaattagagaacatcctgtattacttaaccgtgcaccaacacttcatagacttggtattcaagcatttgaaccaactttagttgaaggtcgtgcgattcgtctacatccacttgtaacaacagcttataatgctgactttgacggtgaccaaatggcggttcacgttcctttatcaaaagaggcacaagctgaagcaagaatgttgatgttagcagcacaaaacatcttgaaccctaaagatggtaaacctgtagttacaccatcacaagatatggtacttggtaactattaccttactttagaaagaaaagatgcagtaaatacaggcgcaatctttaataatacaaatgaagtattaaaagcatatgcaaatggctttgtacatttacacactagaattggtgtacatgcaagttcgttcaataatccaacatttactgaagaacaaaacaaaaagattcttgctacgtcagtaggtaaaattatattcaatgaaatcattccagattcatttgcttatattaatgaacctacgcaagaaaacttagaaagaaagacaccaaacagatatttcatcgatcctacaactttaggtgaaggtggattaaaagaatactttgaaaatgaagaattaattgaacctttcaacaaaaaattcttaggtaatattattgcagaagtattcaacagatttagcatcactgatacatcaatgatgttagaccgtatgaaagacttaggattcaaattctcatctaaagctggtattacagtaggtgttgctgatatcgtagtattacctgataagcaacaaatacttgatgagcatgaaaaattagtcgacagaattacaaaacaattcaaccgtggtttaatcactgaagaagaaagatataatgcagttgttgaaatttggacagatgcaaaagatcaaattcaaggtgaattgatgcaatcacttgataaaactaacccaatcttcatgatgagtgattcaggtgcccgtggtaacgcatctaactttacacagttagcaggtatgcgtggattgatggccgcaccatctggtaagattatcgaattaccaatcacatcttcattccgtgaaggtttaacagtacttgaatacttcatctcaactcacggtgcacgtaaaggtcttgccgatacagcacttaaaacagctgactcaggatatcttactcgtcgtcttgttgacgtggcacaagatgttattgttcgtgaagaagactgtggtactgatagaggtttattagtttctgatattaaagaaggtacagaaatgattgaaccatttatcgaacgtattgaaggtcgttattctaaagaaacaattcgtcatcctgaaactgatgaaataatcattcgtcctgatgaattaattacacctgaaattgctaagaaaattacagatgctggtattgaacaaatgtatattcgctcagcatttacttgtaacgcacgacatggtgtttgtgaaaaatgttacggtaaaaaccttgctactggtgaaaaagttgaagttggtgaagcagttggtacaattgcagcccaatctatcggtgaaccaggtacacagcttacaatgcgtacattccatacaggtggggtagcaggtagcgatatcacacaaggtcttcctcgtattcaagagattttcgaagcacgtaaccctaaaggtcaagcggtaattacggaaatcgaaggtgtcgtagaagatattaaattagcaaaagatagacaacaagaaattgttgttaaaggtgctaatgaaacaagatcataccttgcttcaggtacttcaagaattattgtagaaatcggtcaaccagttcaacgtggtgaagtattaactgaaggttctattgaacctaagaattacttatctgttgctggattaaacgcgactgaaagctacttattaaaagaagtacaaaaagtttaccgtatgcaaggtgtagaaatcgacgataaacacgttgaggttatggttcgacaaatgttacgtaaagttagaattatcgaagcaggtgatacgaagttattaccaggttcattagttgatattcataactttacagatgcaaatagagaagcatttaaacaccgtaagcgtcctgcaacagctaaaccagtattacttggtattactaaagcatcacttgaaacagaaagtttcttatctgcagcatcattccaagaaacaacaagagttcttacagatgcagcaattaaaggtaagcgtgatgacttattaggtcttaaagaaaacgtaattattggtaagttaattccagctggtactggtatgagacgttatagcgacgtaaaatacgaaaaaacagctaaaccagttgcagaagttgaatctcaaactgaagtaacggaataacaagtatataacagaggctaatgctttagcctcttgttatttttatgtaaattatttgatttaatgttgacgaattctcttgttcaatgttaaaatattaaaggttgatgcaagcagaactttggaggataaattattgtctaaggaaaaagttgcacgctttaacaaacaacattttgtagttggtcttaaagaaacgcttaaagcgttaaagaaagatcaagttacatctttgattattgctgaagacgttgaagtatatttaatgactcgcgtgttaagccaaatcaatcagaaaaatatacctgtatcttttttcaaaagcaaacatgctttgggtaaacatgtaggtattaacgtcaatgcgacaatagtagcattgattaaatgagaattagtaagtgttttacttactaaattttatttaacctaaaaatgaaccacctggatgtgtgggattaaaaagtgaagagaggaggacatatcacatgccaactattaaccaattagtacgtaaaccaagacaaagcaaaatcaaaaaatcagattctccagctttaaataaaggtttcaacagtaaaaagaaaaaatttactgacttaaactcaccacaaaaacgtggtgtatgtactcgtgtaggtacaatgacacctaaaaaacctaactcagcgttacgtaaatatgcacgtgtgcgtttatcaaacaacatcgaaattaacgcatacatccctggtatcggacataacttacaagaacacagtgttgtacttgtacgtggtggacgtgtaaaagacttaccaggtgtgcgttaccatattgtacgtggagcacttgatacttcaggtgttgacggacgtagacaaggtcgttcattatacggaactaagaaacctaaaaactaagaatttagtttttaattaaatcttaaacttaaaatatttaatataaggaagggaggatttacattatgcctcgtaaaggatcagtacctaaaagagacgtattaccagatccaattcataactctaagttagtaactaaattaattaacaaaattatgttagatggtaaacgtggaacagcacaaagaattctttattcagcattcgacctagttgaacaacgcagtggtcgtgatgcattagaagtattcgaagaagcaatcaacaacattatgccagtattagaagttaaagctcgtcgtgtaggtggttctaactatcaagtaccagtagaagttcgtccagagcgtcgtactactttaggtttacgttggttagttaactatgcacgtcttcgtggtgaaaaaacgatggaagatcgtttagctaacgaaattttagatgcagcaaataatacaggtggtgccgttaagaaacgtgaggacactcacaaaatggctgaagcaaacaaagcatttgctcactaccgttggtaagataaaagcttttaccctgagtgtgttctatattaatgaattttcattaagcgttcatgcttagggcatcgccatatctatcgtatttattcagtaatataaactggaaggagaaaaaatacatggctagagaattttcattagaaaaaactcgtaatatcggtatcatggctcacattgatgctggtaaaacgactacgactgaacgtattctttattacactggccgtatccacaaaattggtgaaacacacgaaggtgcttcacaaatggactggatggagcaagaacaagaccgtggtattactatcacatctgctgcaacaacagcagcttgggaaggtcaccgtgtaaacattatcgatacacctggacacgtagacttcactgtagaagttgaacgttcattacgtgtacttgacggagcagttacagtacttgatgcacaatcaggtgttgaaccacaaactgaaacagtttggcgtcaggctacaacttatggtgttccacgtatcgtatttgtaaacaaaatggacaaattaggtgctaacttcgaatactctgtaagtacattacatgatcgtttacaagctaacgctgctccaatccaattaccaattggtgcggaagacgaattcgaagcaatcattgacttagttgaaatgaaatgtttcaaatatacaaatgatttaggtactgaaattgaagaaattgaaattcctgaagaccacttagatagagctgaagaagctcgtgctagcttaatcgaagcagttgcagaaactagcgacgaattaatggaaaaatatcttggtgacgaagaaatttcagtttctgaattaaaagaagctatccgccaagctactactaacgtagaattctacccagtactttgtggtacagctttcaaaaacaaaggtgttcaattaatgcttgacgctgtaattgattacttaccttcaccactagacgttaaaccaattattggtcaccgtgctagcaaccctgaagaagaagtaatcgcgaaagcagacgattcagctgaattcgctgcattagcgttcaaagttatgactgacccttatgttggtaaattaacattcttccgtgtgtattcaggtacaatgacatctggttcatacgttaagaactctactaaaggtaaacgtgaacgtgtaggtcgtttattacaaatgcacgctaactcacgtcaagaaatcgatactgtatactctggagatatcgcggctgcggtaggtcttaaagatacaggtactggtgatactttatgtggtgagaaaaatgacattatcttggaatcaatggaattcccagagccagttattcacttatcagtagagccaaaatctaaagctgaccaagataaaatgactcaagctttagttaaattacaagaagaagacccaacattccatgcacacactgacgaagaaactggacaagttatcatcggtggtatgggtgagcttcacttagacatcttagtagaccgtatgaagaaagaattcaacgttgaatgtaacgtaggtgctccaatggtttcatatcgtgaaacattcaaatcatctgcacaagttcaaggtaaattctctcgtcaatctggtggtcgtggtcaatacggtgatgttcacattgaattcacaccaaacgaaacaggcgcaggtttcgaattcgaaaacgctatcgttggtggtgtagttcctcgtgaatacattccatcagtagaagctggtcttaaagatgctatggaaaatggtgtcttagcaggttatcctttaattgatgttaaagctaaattatatgatggttcataccatgatgtcgattcatctgaaatggccttcaaaattgctgcatcattagcacttaaagaagctgctaaaaaatgtgatcctgtaatcttagaaccaatgatgaaagtaactattgaaatgcctgaagagtacatgggtgatatcatgggtgacgtaacatctcgtcgtggacgtgttgatggtatggaacctcgtggtaatgcacaagttgttaatgcttatgtaccactttcagaaatgttcggttatgcaacatcattacgttcaaacactcaaggtcgcggtacttacactatgtacttcgatcactatgctgaagttccaaaatcaatcgctgaagatattatcaagaaaaataaaggtgaataatataacttgttttgactagctagcctaggttaaaatacaaggtgagcttaaatgtaagctatcatctttatagtttgattttttggggtgaatgcattataaaagaattgtaaaattctttttgcatcgctataaataatttctcatgatggtgagaaactatcatgagagataaatttaaatattatttttaattagaataggagagattttataatggcaaaagaaaaattcgatcgttctaaagaacatgccaatatcggtactatcggtcacgttgaccatggtaaaacaacattaacagcagcaatcgctactgtattagcaaaaaatggtgactcagttgcacaatcatatgacatgattgacaacgctccagaagaaaaagaacgtggtatcacaatcaatacttctcacattgagtaccaaactgacaaacgtcactacgctcacgttgactgcccaggacacgctgactacgttaaaaacatgatcactggtgctgctcaaatggacggcggtatcttagtagtatctgctgctgacggtccaatgccacaaactcgtgaacacattcttttatcacgtaacgttggtgtaccagcattagtagtattcttaaacaaagttgacatggttgacgatgaagaattattagaattagtagaaatggaagttcgtgacttattaagcgaatatgacttcccaggtgacgatgtacctgtaatcgctggttcagcattaaaagctttagaaggcgatgctcaatacgaagaaaaaatcttagaattaatggaagctgtagatacttacattccaactccagaacgtgattctgacaaaccattcatgatgccagttgaggacgtattctcaatcactggtcgtggtactgttgctacaggccgtgttgaacgtggtcaaatcaaagttggtgaagaagttgaaatcatcggtttacatgacacatctaaaacaactgttacaggtgttgaaatgttccgtaaattattagactacgctgaagctggtgacaacattggtgcattattacgtggtgttgctcgtgaagacgtacaacgtggtcaagtattagctgctcctggttcaattacaccacatactgaatttaaagcagaagtatacgtattatcaaaagacgaaggtggacgtcacactccattcttctcaaactatcgtccacaattctatttccgtactactgacgtaactggtgttgttcacttaccagaaggtactgaaatggtaatgcctggtgataacgttgaaatgacagtagaattaatcgctccaatcgcgattgaagacggtactcgtttctcaatccgcgaaggtggacgtactgtaggatcaggcgttgttactgaaatcattaaataatttctaatttcttagattttatataaaaagaagatccctcaatcgaggggtctttttttaatgtgtaaattttgtaatggctattcgatttagaagaacaataattgatgaaagactgactaataaaacttataactgataatactgtttaaataaaattgttgagtcttggacattgtaaaatgctcccttcaaagttttcattttttcaatgtctactttgaagggagcatttcattagtttatgtcccagattcatatctttcaattaatttaaatgcttaatttgttttaaatacttgctctaattcaatgatttttaaaaatacagctacagcgtattttaatgatttttcatcaatatcaaatttgggattatggtgtggcgctgtaatacctttactttcattaccacaaccagtcagaaagaatgcacctggtcgtactttcaaataatgtgaaaaatcttctccaatcatcattaaatctgattcattaaagcgtacatgtaagtcatttgttgcttctttaataacttgatatgctttctcgttattatggacaggcaaataccctttaatataattcaaatcatagttaatatcatttgctattgctaaaccttgtagaagcttatccattttgtccattacatgattctgtatatctgaatcgaaagttctaactgtacctttacaaaatgcttgatcaggaataacgctatctgtggtacctgcttgaatcattccaaatgaaagtacagcttgtttaactggatcgatcgtacgtgaaattattttttgtgcacttaaaatgaactctgccatgattactattgggtcaatggtttcatgaggtttggcaccatgaccaccacgacctttaattgtgacgctaaattcatctggagaggccatgattgcccccgcacgtgaatgaatagttccagtaggataaccactccataaatgtgtaccgtaaattctatctacattttccagacatccagcatctatcatttcttgagaaccacctggcatgatttcttcaccgtactggaatattaatacaacattaccttctaataaatgtttatgttcatctaaaatctctgctacagtaagtaaaattgctgtatgaccatcatgcccacacgcatgcatacatcctggatttttagacttataaggcacatcgtttaattcctcgacaggtaacgcatcaaagtcagctcttaatgcaatggtaggtcctgtgcccaagcctttaaatgtggctttgataccattgcggccgataggagtttcaatatcacaagataactggcttaattggttaacaatataatcatgtgtttgaaattcttcaaaagataactcaggatattggtgtaaataacgtctgagttgaattgttttattttctttattatttgctagttggaaccaatctaacacccttatcactactttctaaaataatgtttatagtataacattttatgaaattatcgtactaaatgattgctttgagatattttatctatgaatgataaggctttcaagttatgtagaattactgtatgataaaggtattaccaaacaatacttaagggggattatatactgtggttcaatcattacatgagtttttagaggaaaatataaattatctaaaagaaaatggtttgtataatgaaatagatacaattgaaggtgcaaacggaccagaaatcaaaatcaatgggaaatcatacattaacttatcttcaaataattatttaggactagcaacaaatgaagatttgaaatcagctgcaaaagcagctattgatacacatggtgtaggtgcaggcgctgttcgtacaatcaatggtacattagatttacacgacgaattagaagaaacactagcaaaatttaaaggaacagaagctgcaatagcttatcagtcaggatttaattgtaatatggctgctatttcagctgtcatgaataaaaatgatgctattttatcagatgagcttaatcatgcatcaattattgatggatgtcgcttatctaaagctaaaattattcgagttaaccattcagacatggatgatttacgtgcgaaagcaaaagaagcagttgaatcaggtcaatacaataaagtgatgtatatcactgatggcgtttttagtatggatggtgatgtggctaaattacctgaaattgtagaaattgcagaagaatttggtttattaacttatgttgacgacgctcatggttcaggtgttatgggtaaaggcgctggtacggttaaacattttggtttacaagataaaatcgatttccaaataggtacgctttctaaagcaattggtgtcgttggcggctatgtagcaggtacaaaagagttaatagattggttaaaagcacaatcacgaccattcttattctctacatcattagcacctggggataccaaagcaataactgaagcagttaaaaagttaatggattcaactgaattacatgataaattatgggacaatgcacaatatttaaaaaatggattgtcaaaattaggatatgatacaggtgagtcagaaactccaattacaccagtaattattggtgatgaaaaaacaactcaagaatttagtaagcgtttaaaagacgaaggtgtctatgtgaaatctatcgttttcccaacagtaccaagaggtacaggacgtgtaagaaatatgcctacagctgcacatacaaaagacatgttagatgaagcaattgcggcttatgaaaaagtaggaaaagaaatgaagttgatttaatatttatttatttattcccacggcaaatattgtcgtgggctttttttaatgtttagtttattaacagtaagttcttataacaatgtttagtgctccccaaaattgaagtttgaattttaaaagcatcttgtagaatttagttgtattttttacaaagaaattcattttgattatttttgataatgagtattttaatagtaatacatgtttatagtgtgtagtatatgtctatactagtagtaactatatagagaaagtaggaataaactatgtcacaagatgtaaatgaattaagtaagcaaccaacgccagataaagcagaagataacgcatttttcccatcaccatattcccttagtcaatatacagcacctaaaacagattttgatggtgttgaacacaaaggtgcctataaagatggtaaatggaaagtattgatgattgctgctgaagagagatatgtattattggaaaatggaaaaatgttctctacgggtaatcatcctgttgaaatgttattacctttacatcatttaatggaagcaggttttgacgttgatgttgcgacattatctggttatccagttaaattagaattatgggctatgccaactgaagacgaggcagttataagtacttataataaattgaaagaaaaattaaaacagccaaaaaaattagcagatgtgattaaaaatgaattaggacctgattcagactatttatctgtctttatcccaggcggacatgctgcagttgttggtatttctgaaagtgaggacgttcaacaaacattagattgggcattagacaatgaccgctttatagttacattatgtcatggaccagcagcactactttcagcagggcttaacagagaaaaatctccattagaaggatactctgtttgtgtcttccctgactcattagatgaaggtgcaaatattgaaataggttatttacctggacgcttgaaatggttagttgctgatttattaactaaacaaggattaaaagtagttaacgacgatatgacaggaagaacgttaaaagatcgtaaattattaacaggtgacagtcctttagcttcaaatgagttaggaaaattagcagttaatgaaatgttaaatgcaatacaaaataaataattaaatattaattagaggagcctcatatgtaaatgtatgaggactcttttttttggcaaaatttaagtgatacttgtaaaatagaacctattatgagtatgatttaagaaaacgcttgcaaaactaataaccgcaactagcgatatggaggaaacatgatgtcgtatagcattggaattgattatggaactgcttcaggccgtgtgtttttaattaatacaactaacggtcaagtagtatcaaaatttgtgaaaccatatacacatggtgtcattgaaagtgaattaaatggtttgaaaataccacatacatatgcacttcaaaatagtaatgattatttagaaattatggaagaaggaatatcatatatagtacgtgaatcaaaaatagatccagtcaatatagtaggtattggtatagactttacttcatctactattatttttactgacgaaaaccttaacccggtacataatttaaaacaatttaaaaacaatccacatgcgtatgtgaaactttggaaacatcatggtgcatataaagaagcagagaaattatatcaaactgctattgaaaataataataagtggttaggccattatggatataatgttagtagtgaatggatgattcccaaaataatggaagtcatgaatcgagcaccagaaattatggaaaaaacggcttatattatggaagcgggcgattggattgtaaataaattaactaataaaaatgtacgctcgaattgtggattaggtttcaaagcattttgggaagaagaaacagggtttcattatgatttatttgataaaatagaccccaaattatcaaaagtaattcaagataaagtatctgcaccggttgttaatattggtgaagtagtagggaaactggacgataaaatggcacagaaattaggattatcaaaagagactatggtaagtccttttattattgatgcccatgctagtttattaggtattgggtctgaaaaagataaagaaatgactatggtgatgggaacaagcacatgccatcttatgttaaatgaaaagcaacatcaagtgccaggtatatcaggttctgtaaaaggagcaattattccagaattatttgcttatgaagcggggcaatcagcagtaggtgatttgtttgagtatgtcgctaagcaagcaccaaagtcatatgtagatgaagcagcaaatagaaatatgactgtatttgaattaatgaatgaaaagataaaacatcaaatgccaggtgaaagtgggctcattgctcttgattggcataatggaaatcgaagtgtattaagtgatagcaatttaacaggttgtatctttggattaactttacaaactaagcatgaggatatttatagagcatatttagaagctacagcatttggtactaagatgattatgcaacagtatcaagattggcatatggaagtagaaaaggtatttgcatgtggcggtatacctaaaaagaatgctgttatgatggatatctatgcgaatgtactgaataaaaaactaattgttatggatagtgagtatgcaccagcaataggcgcagcaatattaggtgcagtcagtggtggcgcacataattcaattaatgatgcagttgatgctatgaaagagccaattttatacgaaattaatccagaagcggaaaaagtacaaaggtatgaaacattatttaaagcttataaggctttacatgatatccatggttataaaaaagctaatataatgaaagatatccagagtttaagagttgagggataaaaaatttaatttgacagtaattagcaataataaacgctataaattactaaaatcaattaatacaactagaatttccatttacagaaacatcagcaacatgtacatgtcatatatacaagaaagcgcttttatattataattattatgaaaatgaatattatgtccgcttgtgacggactatagctatatagaagagacaaaggagatatttctatgaaaaaaattatgattactggtgcattaggacaaattggtacagaattagttgttaagtgcagagaaatttatgggacagataatgttcttgctacagatattagggaacctgaagcagactcacctgtacaaaatggaccatttgaaattttagacgtaacagatcgtgaccgcatgtttgagttagttagggactttgaagcggatagtctaatgcatatggcagcattattatcagcaactgcagagaaaaatccaattctagcttgggatttaaatatgggtggattaatgaatgcattagaagctgcaagaacttataatttgcactttttcacaccaagttcaattggtgcatttggagactcaactcctaaagttaatacgccacaagtaacgattcagcaacctacgacaatgtatggtgtaaataaagtagctggagaattattgtgtcaatactatttcaaacgttttggtgtagatacaagaagtgttagattcccaggtttaatctcgcatgttaaagagccaggtggcggtactacagactatgctgttgaaatatacttcaaagcagtaagagagggtcattatacaagcttcatagataaaggcacgtatatggatatgatgtatatggatgatgcaattgaagcaattattaaacttatggaagcagacgacgctaaattagaaactagaaacggttataatttgagcgcaatgagttttgatccagagatggtaaaagaagcaattcaagaatactatccaaattttacattagattatgatgttgatcctattagacaaggtatcgctaatagttggccggattctattgatacaagctgttcacgtggcgaatggggatttgatcctaaatatgatttagcgagcatgactaaattaatgttagaagctattgaacaaaaagatactgttaaaaataataactaatcatttccattcactttaatacacggaatgatattttaaattactctttattttaataaactagtgcatgaattctaatattattcattatacatattgaattcgcgagcttagttcattttaaagtaaagagttttttgtatgtaaagtatattagtaaaacacagattacttgtctctgtgaaattaatacgtttatactaaaagatatagtctttctagaaaatctgttaattaattttgaatttttagaaaatttattgaacagcaaaatatggattgttataatttaagttaaacaaattcttatacaatattattaggaggcaatcaccatgtcacaagcagttaaagttgaacgacgagaaacattaaaacaaaaaccaaatacatctcaactaggttttggtaaatattttactgattatatgttgagttatgattatgatgcagataaaggatggcatgatttgaagatagtaccttatggtcctattgaaatttcacctgctgcacaaggtgttcattatggtcaatcggtattcgaaggattaaaagcatataaaagagatggggaagttgcacttttccgtcctgaagaaaattttaagcgtcttaataactcgttagcacgattagaaatgcctcaagtagacgaagcagaattgttagaggggctaaaacaattagttgatatagaaagagattggattcctgaaggggaaggtcaatcattatatattcgtccatttgtttttgcaacagaaggggcacttggcgttggtgcatcacatcagtataaattattaattattttatctccttcaggtgcatattatggtggtgagactttaaaaccaactaaaatctatgtagaagatgaatatgtgcgtgctgttcgtggcggtgtaggctttgcaaaagttgcaggtaactatgcggcaagtttattagcacaaacaaatgcaaataaattaggttatgaccaagtattatggcttgatggtgttgaacagaaatatatcgaagaagttggtagcatgaatattttcttcgttgaaaatggaaaagtaattacaccagagttgaatggcagtattttacctggtattacacgtaaatctattatcgaattagctaaaaacttaggatatgaagtcgaagagcgccgcgtttcaatcgatgaattattcgaatcatatgataaaggtgagttaacagaagtatttggtagtggtactgcagcagttatttcacctgtgggtacattgagatacgaagatcgtgaaatcgttattaataataatgagactggtgaaattactcaaaaattatacgacgtctatactggtattcaaaatggtactttagaagataaaaatggttggagagtcgttgtaccaaaatattaataaaaattgaatataatcatgaaaacaatatgtaaaagttaatcatgactaaaatccctttcaatgaagcgaagcatggtaataaattaagtttacaatgtttattgttaagtattgaaggggatttcacttattattatatttaattcaatatttaaatagaacaatactacgagttcattttcaggggataacgaatatcatagaatcagcataatacgaaataaataaataggagtattgatatcaatggaatggatattatttgataaagatggtacgttaattgaatttgatagaagttgggaaaaaataggggtacgatttgtacaatcattgcttgagactttcccagtacataataaagaagctgctttaagacaactcggtgtcattaaagaatctattgatccaaaatcagtgatgggttcaggatctttacaacaaattatccaggcatttaatgatgtgacgggacaagatacaaccgactggtccaagtcaacaagtcaaaagctggtagatgaacgtattcctgaaattaattgggtagaaggtgttaaagaagcacttatcgatttgaaagcaaaaggctatcaacttggtattgttacgagtgatactaaaaaaggtgtagaacaatttttagcacataccaatgctatctcgttgttcgatttgatcatttctaccgaagcggatgcctatgagaagccaaatcctaaagtattatcgcctttatttgagcaatataatgtagatcctcagaaagtagctatagtaggagacactgctaatgatatgaagacagcaagtaatgcaaatttaggtatggcaataggtgtattaacaggtattgcaacaaaagaagaattacatgaagctgatattattttaaatagtgcggcagatattttagaagctttaaattaaaaagaaagacatagtgtatatgtgaattaatgtattcgatagaattgataatgtaatcgatgatatctatggaatatacattgaatataaacatatacgctatgtctttagtcttttatcgtgtatctacttgtcgatatgtttgaataattcgagcaattttgtctatcataggatttaaagattcggggtccttatggatatcatattcattaatattgatacgtacaactggacatgcattaaagctattaatccaatcgtcatagcgtttaaatagctttttccagtattcagggtctgtattaatttccatttcgcgaccacgttcaataatacgatcaatgacctcatcatagttacattctaaataaatcattacatctggtttaggaaaataaggtgtcatgaccatggcattaaataagtctgaatatgttttgaaatcttctttactcattgtgccttcttcttcatgcatttttgcaaaaatatcaacatcttcataaattgatcgatcttggacaaagccaccaccatattcaaacatacgcttttgttctttaaaacgttcagctaagaagtaaatttgcaaatggaaactccatcgttcaaaatcgctataaaatttatctaaatatggattatgttcgacattttcaaaagacgttttaaagtttaatttatctgcaagtgcttgcgttagtgttgattttccaacaccaactgtacctgcaatggttataatggcattttgtggaataccgtaattattcattggtaatatctcctatcataggtaatataatatgtaatatatcttcgtaatcttgttcatttttaagaaaatcaatagaagttgtatcgattaaaactacatttgaaccattactttgtaaggactcataatactcacgataatctttttttaactttaacagatattcatcttctatttgatgctcaaaactacggttacgtttagcaattctagattttaacacatcaaggtctgcatctaaaaagataatcatattcggcataatcatatcttcagttaaaatatcataaattttactgaatttctgaaattcaacaggactcaaagtatttttagcaaatatcttatttttatgtatatgataatcactaactacaccttgatttagttgtgttacatcttgaaattgcttatatctattgcataaaaagaacatttcagtttgaaaactccatttagagatatcttcataaaagtctgataaaaatggattttctgtgatgatttctttttcttcataaaaatctaaagtttgacttaatttgtgtgcaagtgaagatttacctacgccaataggaccttcaattgctataaaaggtttgttcatattcacatctccaaatgttaaaatagacattgagtattgtaccataagtgaggtatctggacataaatgacaaatgatatatattttatgacattagcgattgaagaagctaaaaaagcagctcaactaggcgaagtacctataggtgctatcatcactaaagatgatgaagttatcgctagagcacataatttaagagaaacactacaacaaccaacggcgcatgctgaacatattgcaattgaacgtgcagccaaagtgttaggtagttggcgtttagaaggttgcacattatatgtaaccttagaaccatgtgtcatgtgcgcaggaacaattgtaatgagtcgcattccaagagtcgtctatggcgcagatgatcctaaaggtggttgtagtggcagtttaatgaatttattgcaacaatctaattttaatcatcgtgcaattgttgataaaggtgtacttaaagaagcatgtagcacattattaacaacattttttaaaaacttaagagccaataagaaatccaccaattagacgatagtacatactaattaaaatttgttagaattacattatatgataaattaatgacaatataaatgttaatagaaaagtatgtgcgctgagtatatattcttatttaagaacaagattttaaatttacgaaacgaggtaacataatgataaaactaatagccactgatatggatggcacgctacttaatgcagcacatgaaatttctcaacctaatattgatgcgattaaatacgctcaagaacaagggataacggttgttatcgcgacaggtcgagcattttatgaagcacaagcaccagttgctgacacagatttaacagtaccatatatttgtttgaatggtgctgaagtacgtgatgaaactttcaatgtaatgagcacttcacaccttaataaatcgttagtacacaaaattacaaatgttttaaaagatgcaggtatttattatcaagtatacacgagtcgtgcgatttatactgaagatccacaaagagatttagacatttacatagatattgctgagcgtgcaggtcaacatgcaaacgttgagcgtattaaaaatggtattcaaagacgcatagataatggtacgttgaaagttgttgataattatgatgctattgaaaacatacctggtgaattaattatgaaaatattagcatttgatggaaatttagaaaaaattgacaaagctagtaaaattttagctgaatctccgaatttagctatatcatcatcttcgagaggaaatatagaaataacgcattcagatgcacaaaaaggtattgcgctagaaacaattgccgaaagattagggattgaaatgaaagatgtcatggcaataggtgacaatttaaatgacttatcaatgttagagaaagttggctatccagttgcgatggaaaatggtgcagaagaagttaaaaaaatagcgaaatatgtcacagatacgaatgaaaatagtggtgttggaaaagctattatgaaattattacgtgaacaacaagtttaataaaaaaaagaggggtcaaatatgaaaggattaattattattggcagtgcacaagtgaattcacatacaagtgcactagcaagatacttaactgagcattttaaaacacatgatattgaagcggaaatattcgatttagcagaaaaaccgttaaatcaattagatttttcaggaacaacaccgtctattgatgaaatcaaacaaaatatgaaagatttaaaagagaaagcaatggcggcggactttttaatattaggaacgccaaactatcatggttcatattctggaatattgaaaaatgcattagatcatctaaatatggattattttaaaatgaaacctgtaggcttaataggaaatagtggtggtattgttagttcagagccattgtcacatttaagagtaatcgtcagaagtttactaggcattgctgtaccaactcaaatagcaacacatgattctgattttgctaaaaatgaagatggttcatattacttaaatgatagtgaattccaattacgagcaagattatttgtcgatcaaattgtatcttttgtgaataatagtccatatgaacatttaaaataatattaaaaaatatgtaaatatacattaaaaataggtatgtagcttaaggtatttcattgagaatgcttttaagtcacatgcctttttttgttctaatgcaccaatagtaagcctttgagattactgttgtgagcaatgttattaattaaaataagatgtaatagcgaattgaaaacaagcttagattaaaagagagttttaaaaatatagataaataatttaaagcaattaaagaaaaaagtattaaaaattgcaattcttaaactgtgattcatattaatatttgtagcaaataacattgtaaaataaagaaaaataattaaagtattgcactttattgaaatttatattacgatagtaatgcagaaatttatatatgcaaaatattatatttatcaaattttgatattttaaaggagtattattaaatgaataataaaaagacagcaacaaatagaaaaggcatgataccaaatcgattaaacaaattttcgataagaaagtattctgtaggtactgcttcaattttagtagggacaacattgatttttgggttaagtggtcatgaagctaaagcggcagaacatacgaatggagaattaaatcaatcaaaaaatgaaacgacagccccaagtgagaataaaacaactgaaaaagttgatagtcgtcaactaaaagacaatacgcaaactgcaactgcagatcagcctaaagtgacaatgagtgatagtgcaacagttaaagaaactagtagtaacatgcaatcaccacaaaacgctacagctagtcaatctactacacaaactagcaatgtaacaacaaatgataaatcatcaactacatatagtaatgaaactgataaaagtaatttaacacaagcaaaaaacgtttcaactacacctaaaacaacgactattaaacaaagagctttaaatcgcatggcagtgaatactgttgcagctccacaacaaggaacaaatgttaatgataaagtacattttacgaacattgatattgcgattgataaaggacatgttaataaaacaacaggaaatactgaattttgggcaacttcaagtgatgttttaaaattaaaagcgaattacacaatcgatgattctgttaaagagggcgatacatttacttttaaatatggtcaatatttccgtccaggttctgtaagattaccttcacaaactcaaaatttatataatgcccaaggtaatattattgcaaaaggtatttacgatagtaaaacaaatacaacaacgtatacttttacgaattatgtagatcaatacacaaatgttagcggtagctttgaacaagtcgcatttgcgaaacgtgaaaatgcaacaactgataaaactgcttataaaatggaagtaactttaggtaatgatacatatagtaaagatgtcattgtcgattatggtaatcaaaaaggtcaacaacttatttcgagtacaaattatattaataatgaagatttgtcacgtaatatgactgtttatgtaaatcaacctaaaaagacctatacaaaagaaacatttgtaacaaatttaactggttataaatttaatccagatgctaaaaacttcaaaatttacgaagtgacagatcaaaatcaatttgtggatagtttcaccccagatacttcaaaacttaaagatgttactggtcaattcgatgttatttatagtaatgataataagacggcgacagtagatttattgaatggtcaatctagtagtgataaacagtacatcattcaacaagttgcttatccagataatagttcaacagataatgggaaaattgattatactttagaaacacaaaatggaaaaagtagttggtcaaacagttattcaaatgtgaatggctcatcaactgcaaatggcgaccaaaagaaatataatctaggtgactatgtatgggaagatacaaataaagatggtaaacaagatgccaatgaaaaagggattaaaggtgtttatgtcattcttaaagatagtaacggtaaagaattagatcgtacgacaacagatgaaaatggtaaatatcagttcactggtttaagcaatggaacttatagtgtagagttttcaacaccagccggttatacaccgacaactgcaaatgcaggtacagatgatgctgtagattctgatggactaactacaacaggtgtcattaaagacgctgacaacatgacattagatagtggattctacaaaacaccaaaatatagtttaggtgattatgtttggtacgacagtaataaagatggtaaacaagattcgactgaaaaaggaattaaaggtgttaaagttactttgcaaaacgaaaaaggcgaagtaattggtacaactgaaacagatgaaaatggtaaataccgctttgataatttagatagtggtaaatacaaagttatctttgaaaagcctgctggtttaactcaaacaggtacaaatacaactgaagatgataaagatgccgatggtggcgaagttgatgtaacaattacggatcatgatgatttcacacttgataatggctactacgaagaagaaacatcagatagtgactcagattcggacagcgattcagactcagatagcgactcagattcagatagtgactcagactcagatagcgactcagactcagatagcgactcagacagcgactcagactcagatagtgattcagattcggacagcgactcagattcagacagcgaatcagattcggatagcgactcagactcagatagcgactcagacagcgactcagattcagacagtgactcagactcagacagcgactcagattcagacagcgattcagattcggatagcgactcagattcagatagcgattcggactcagacaacgactcagattctgacagcgattcagactcagatagcgactcagattcagacagcgactcagattcagacagcgattcagattcagatagcgattcagattcagacagcgactcagattcagatagcgactcagactcagacagcgattcagactcagatagcgactcagacagcgattcagattcggatagcgattcagattcagatgcaggtaaacatactccgactaaaccaatgagtacggttaaagatcagcataaaacagctaaagcattaccagaaacaggtagtgaaaataataattcaaataatggcacattattcggtggattattcgcggcattaggatcattattgttattcggtcgtcgtaaaaaacaaaataaataatatgattaacttaaccaggtccatgtggcctggttttttctgtttagaaattcccagatataaaacaaaaaatctttaaggaatagatgcaatttaatttgttacagaaatgtaattgtctatgaattagaaaagctaagatattaattttaagggcaaataatactattttttatgataattaaataaagattacaaaactcataaaaacttttatttaaacacaaatgttaaataacgttttacgataaagaaaaataattaaagtattgtgctttatctaaaaatgtaatactatattgatatacatttttgtatttaaaacaattgtattatttaaaaatttgatgaattaggagtaatctaatgctaaacagagaaaataaaacggcaataacaagaaaaggcatggtatccaatcgattaaataaattttcgattagaaagtacacagtgggaacagcatcaattttagtaggtacaacattaatttttggtctggggaaccaagaagcaaaggctgcagaaagtactaataaagaattgaacgaagcgacaacttcagcaagtgataatcaatcgagtgataaagttgatatgcagcaactaaatcaagaagacaatactaaaaatgataatcaaaaagaaatggtatcatctcaaggtaatgaaacgacttcaaatgggaataaatcaatagaaaaagaaagtgtacaatctaccactggaaataaagttgaagtttcaactgccaaatcagatgagcaagcttcaccaaaatctacgaatgaagatttaaacactaaacaaactataagtaatcaagaagggttacaacctgatttgctagagaataaatcagtggtaaatgttcaaccaactaatgaggaaaacaaaaaggtagatgcgaaaactgaatcaactacattaaatgttaaaagtgatgctatcaagagtaatgctgaaactcttgttgataacaatagtaattcaaataatgaaaataatgcagatatcattttgccaaaaagtacagcacctaaaagtttgaatacaagaatgcgtatggcagcaatacaaccaaactcaacagattctaaaaatgttaatgatttaatcacatcaaatacaacattaactgtcgttgatgcagataatagcaaaacgattgtaccagcccaagattatttatcattaaaatcacaaattacagttgatgacaaagttaaatcaggtgattatttcacaattaaatactcagatacagtacaagtatatggattgaatccggaagatattaaaaatattggtgatattaaagatccaaataatggtgaaacaattgcgactgcaaaacatgatactgcaaataatttaattacatatacatttacagattatgttgatcgatttaattcagtaaaaatgggtattaattactcaatttatatggatgcagatacaattcctgttgacaagaaagatgttccttttagtgtaactattggaaatcaaattacaactacaacagcagatatcacttatccggcttataaagaagctgacaataattcaataggatcagcttttacagagacagtttctcatgtaggaaatgttgaagaccctggttactataaccaggtagtatatgttaatcctatggataaggatttaaaaggtgctaagttaaaagttgaagcgtaccatccgaaatatccaactaatattggtcaaattaatcaaaatgttacaaatataaaaatatatcgtgttcctgaaggatatacattgaataaaggatatgacgttaatactaatgatttggtagacgtaactgatgaatttaaaaataaaatgacgtatggatcaaatcaaagtgttaatcttgattttggtgatattacatcagcatatgttgtaatggttaatacaaaattccaatatacaaatagcgaaagcccaacacttgttcaaatggctactttatcttcaacaggtaataaatccgtttctactggcaatgctttaggatttactaataaccaaagtggcggagctggtcaagaagtatataaaattggtaactacgtatgggaagatactaataaaaacggtgttcaagaattaggagaaaaaggcgttggcaatgtaactgtaactgtatttgataataatacaaatacaaaagtaggagaagcagttactaaagaagatgggtcatacttgattccaaacttacctaatggagattaccgtgtagaattttcaaacttaccaaaaggttatgaagtaaccccttcaaaacaaggtaataacgaagaattagattcaaacggcttatcttcagttattacagttaatggcaaagataacttatctgcagacttaggtatttacaaacctaaatacaacttaggtgactatgtctgggaagatacaaataaaaatggtatccaagaccaagatgaaaaaggtatatctggcgtaacggtaacattaaaagatgaaaacggtaacgtgttaaaaacagttacaacagacgcagatggcaaatataaatttactgatttagataatggtaattataaagttgaatttactacaccagaaggctatacaccgactacagtaacatctggtagcgacattgaaaaagactctaatggtttaacaacaacaggtgttattaatggtgctgataacatgacattagatagtggattctacaaaacaccaaaatataatttaggtaattatgtatgggaagatacaaataaagatggtaagcaggattcaactgaaaaaggtatttcaggcgtaacagttacattgaaaaatgaaaacggtgaagttttacaaacaactaaaacagataaagatggtaaatatcaatttactggattagaaaatggaacttataaagttgaattcgaaacaccatcaggttacacaccaacacaagtaggttcaggaactgatgaaggtatagattcaaatggtacatcaacaacaggtgtcattaaagataaagataacgatactattgactctggtttctacaaaccgacttacaacttaggtgactatgtatgggaagatacaaataaaaacggtgttcaagataaagatgaaaagggtatttcaggtgtaacagttacgttaaaagatgaaaacgacaaagttttaaaaacagttacaacagatgaaaatggtaaatatcaattcactgatttaaacaatggaacttataaagttgaattcgagacaccatcaggttatacaccaacttcagtaacttctggaaatgatactgaaaaagattctaatggtttaacaacaacaggtgtcattaaagatgcagataacatgacattagacagtggtttctataaaacaccaaaatatagtttaggtgattatgtttggtacgacagtaataaagacggcaaacaagattcaactgaaaaaggtatcaaagatgttaaagttattttattaaatgaaaaaggcgaagtaattggaacaactaaaacagatgaaaatggtaaataccgctttgataatttagatagcggtaaatacaaagttatttttgaaaagcctactggcttaacacaaacaggtacaaatacaactgaagatgataaagatgccgatggtggcgaagttgatgtaacaattacggatcatgatgatttcacacttgataatggctactacgaagaagaaacatcagatagcgactcagattcggacagcgattcagactcagacagcgattcagactcagatagtgattcagattcagatagtgattcagattcagatagtgattcagattcagacagcgactcagactcagatagtgactcagactcagatagcgattcagattcagatagcgattcagactcagacagcgattcagattcagacagcgactcagactcagatagcgactcagattcggacagcgattcagactcagatagcgactcagactcagacagcgattcagactcagatagcgactcagactcagatagcgattcagattcagacagcgattcagattcagacagtgattcagattcagacagcgactcagattcagatagcgattcagactcagactcagatagcgattcagattcagacagcgactcagattcggacagcgactcagactcagacagtgattcagattcagatagcgactcagactcagatagcgactcagattcagacagcgattcagactcagatagtgactcagattcggacagcgattcagactcagatagcgactcagattcagacagtgattcagactcagatgcaggtaagcacacacctgttaaaccaatgagtactactaaagaccatcacaataaagcaaaagcattaccagaaacaggtaatgaaaatagtggctcaaataacgcaacgttatttggcggattattcgcagcattaggatcattattgttattcggtcgtcgtaaaaaacaaaataaataatacagcttataccaggtccgtgaggcctggttttttatttcaaaatttatgaaatgtatcttatgtttgagattaaatagtgcaatttttttaaaaatataacataaatcaacataaatttaattcatctttacattaaaagtacaaacgaataagaaaagcaattaaacacagtatcaaaccatttaaaacaattgatataaaaaacaaacgaataattaaaaattactagaattaatttattcaaaccaaagtgtaaaataacagtcttagataaataaatttatttaaagtattgtgctttatctaaaaatgtattacgatgggaatacaaatttttatatgtaaaaatattaattttttgcaaatattgatattttaaaggagatttatatgattaacagggataataaaaaggcaataacaaaaaagggtatgatttcaaatcgcttaaacaaattttcgattagaaagtatactgtaggaactgcatcgattttagtaggtacgacattgatttttggtctagggaaccaagaagctaaagctgctgaaaacactagtacagaaaatgcgaaacaagatgatgcaacgactagtgataataaagaagtagtgtcggaaactgaaaataattcgacaacagaaaatgattcaacaaatccaattaagaaagaaacaaatactgattcacaaccagaagctaaagaagaatcaactacatcaagtactcaacaacagcaaaataacgttacagctacaactgaaactaagcctcaaaacattgaaaaagaaaatgttaaaccttcaactgataaaactgcgacagaagatacatctgttattttagaagagaagaaagcaccaaattatacaaataacgatgtaactacaaaaccatctacaagtgaaattcaaacaaaaccaactacacctcaagaatctacaaatattgaaaattcacaaccgcaaccaacgccttcaaaagtagacaatcaagttacagatgcaactaatccaaaagaaccagtaaatgtgtcaaaagaagaacttaaaaataatcctgagaaattaaaagaattagttagaaatgataacaatacagatcgttcaactaaaccagttgctacagctccaacaagtgttgcaccaaaacgattaaatgcgaaaatgcgttttgcagttgcacaaccagcagcagttgcttcaaataatgtaaatgacttaattacagttacgaaacagacgatcaaagttggcgatggtaaagataatgtggcagcagcgcatgacggtaaagatattgaatatgatacagagtttacaattgacaataaagtcaaaaaaggcgatacaatgacgattaattatgataagaatgtaattccttcggatttaacagataaaaatgatcctatcgatattactgatccatcaggagaggtcattgccaaaggaacatttgataaagcgactaagcaaatcacatatacatttacagattatgtagataaatatgaagatataaaagcacgtttaactttatactcatatattgataagcaagcagtacctaatgaaactagtttgaatttaacgtttgcaacagcaggtaaagaaactagccaaaacgtttctgttgattatcaagacccaatggttcatggtgattcaaacattcaatctatctttacaaagttagatgaaaacaaacaaactattgaacaacaaatttatgttaatcctttgaaaaaaacagcaactaacactaaagttgatatagctggtagtcaagtagatgattatggaaatattaaactaggaaatggtagtaccattattgaccaaaatacagaaataaaagtttataaagttaaccctaatcaacaattgcctcaaagtaatagaatctatgattttagtcaatacgaagatgtaacaagtcaatttgataataaaaaatcatttagtaataatgtagcaacattggattttggtgatattaattcagcctatattatcaaagttgttagtaaatatacacctacatcagatggcgaactagatattgctcaaggtactagtatgagaacaactgataaatatggttattataattatgcaggatattcaaacttcatcgtaacttctaatgacactggcggtggcgacggtactgttaaacctgaagaaaagttatacaaaattggtgactatgtatgggaagacgttgataaagacggtgtccaaggtacagattcgaaagaaaagccaatggcaaacgttttagttacattaacttacccggacggtactacaaaatcagtaagaacagatgctaacggtcattatgaattcggtggtttgaaagacggagaaacttatacagttaaattcgaaacgccagctggatatcttccaacaaaagtaaatggaacaactgatggtgaaaaagactcaaatggtagttctataactgttaaaattaatggtaaagatgatatgtctttagacactggtttttataaagaacctaaatataatcttggtgactatgtatgggaagatacaaataaagatggtatccaagatgctaatgaacctggtatcaaagatgttaaggttacattaaaagatagtactggaaaagttattggtacaactactactgatgcctcgggtaaatataaatttacagatttagataatggtaactatacagtagaatttgaaacaccagcaggttacacgccaacggttaaaaatactacagctgaagataaagattctaatggtttaacaacaacaggtgtcattaaagatgcagataatatgacattagacagtggtttctataaaacaccaaaatacagtttaggtgattatgtttggtacgacagtaataaagacggtaaacaagattcaactgaaaaaggtatcaaagatgttaaagttactttattaaatgaaaaaggcgaagtaattggaacaactaaaacagatgaaaatggtaaatatcgtttcgataatttagatagcggtaaatacaaagttatttttgaaaagcctgctggcttaacacaaacagttacaaatacaactgaagatgataaagatgccgatggtggcgaagttgacgtaacaattacggatcatgatgatttcacacttgataacggatacttcgaagaagatacatcagacagtgattcagactcagacagtgattcagactcagacagcgactcagattcagacagtgattcagactcagatagcgattcagattcagacagcgactcagactcagatagcgactcagactcagacagcgactcagactcagatagcgactcagattcggacagcgattcagactcagatagcgactcagattcagacagcgattcagactcagatagcgactcagattcagacagtgactcagactcagatagcgactcagactcagacagtgactcagactcagacagcgattcagattcagatagcgactcagattcggacagtgattcagactcagatagcgactcagattcagacagcgactcagactcagatagcgactcagattcggacagcgactcagactcagatagcgactcagactcagacagtgattcagactcagatagcgattcggactcggatgcaggaaaacatacacctgttaaaccaatgagtactactaaagaccatcacaataaagcaaaagcattaccagaaacaggtagtgaaaataacggctcaaataacgcaacgttatttggtggattatttgcagcattaggttcattattgttattcggtcgtcgcaaaaaacaaaacaaataatacaatatgacccaggtccttgtggcctggtttttttttatgattacacatgcaatagatgtatttttcatataaaataaacaataaagatacggaataaaacttatatgaggcgataatatgaattacattttaggaacaattttagaaagtaaaattacaggtgtagaaaaagcgcaaataaatagattgaagttgttcaaacaacacggcatatcttcaaaatgtgtatatgttaaatggaatccttattcatacacatatgcgaagcaacatcagattgaaaatgatgtatttacaatgtatgactattttcaaaaagcaatcaattataaaaagacaaagcaagttaactggatacagtattgggaaaagtcatgtaggtacacattgaaatttgtggaaaattcaaatgatgtcagaatatatgatgaagagcaatttgtaatgtatgctcattttttagataaacagtatcatcaattaaactatgtgaattattttgatcataaaagaagaaaagtaaaacgcgaattgtatgatggaagaggctttttaagttgttctcgaattttaggtgaaggacaacggattgtactcgaaaattactatacacctaatggggaaatcgtcatccaaaaatatttcgacgatataaaaggaaaaaacacgctcacaaaggttatcttaaatgaagaccagcagcaacaattttttgatacagaagatgaattagttcaatattttctccatcaattatgtaaaaataatgatcaaatcatattagatcgtcctcatgaattaggaaatgttatagcgggattaaatcaaagtattccagttgttgttgtgctccatagtacacatttatccggtaccggtaatggtataaaaagtttttataaaacagtatttaataatttaacacgttataaagcgattgttgtatcaacagaacagcaatgccaagatatttcacaatatattgaaaataaaataccagttatcaatattccggttggctacgtggcaaatttaaagtatcaatttgacatcaatcaaaaggagaaaaatcatatcatatcaattgctcgcctcgttgaaaataaacaaattaaacatcaaattgaagtgatcaagcaattagtaacaaaacatcccaatattcaattgaatatttatggacatggaaatggtttgtcagaatatcgacaacttgtagaagattatcatttatcggaacatgttaaatttcatggttttaagacgcatattaatgaagagattgctaaagcagaactgatgttatcgacaagtaaaatggaaggttttggcttagcaattttagagtcgctttcagtaggtacaccagtgatcagttatgatatagattatgggccatcagaactgattcaagatggatttaatggctatttagtacctaaaggtgacatcaatcaaatggttgaaaaggtcgatcaattactaaataatactcaaaaattgcaacagttttcgattaatagcatagaatctgcacaacagtacaatgcaactactatcagtacaaagtggcaaaatattttaaactaagtcaaaagaaaaaagcattttcctagaatcatctatttaacaaacaacgttcatacgaacttacatgtttagttaaatgacataggaaaacgcttttttttataaaaataaaggtgaagtacatttatataagacgaacaaattggtcccattgtttaattaacgacgctttactatattgttgcgcttttgccaaactaccttttgacagtcgttgttgtacttcaggatgatcaatcacatattttactttatcaaatagggcatcttcatcatttttagtaattaaataaccattgaaatcaggcgtaatcaattcgttaggtccatatttaatatcataactaataactggaacaccatgtgctaaagattcaagtagcgctaaagagaaaccttccatgttacttgttattaaacttaagtaagcatcgctgtattcttggtttagattgcttaaaaagccacgtaagtaaacatgattttccaatccatatttttgtatcaattcatttaattttttactttcagaaccaaaaccatacatatgaagctctatttttgggacatacgatactaagcgtttaattaattcaatttgttgatgtaattgtttttcaggtgaataacgagcaacggaaattaatttaacactgcgctgatctaatgtttggactggtgtatcaattgtttcactatagccgacaggaatattaacaattggaatagtatggttaatacgtttttcaacatctaatttttgctgctcagtagaaacgataattgcacgatatcgagataaattttcaaacatcgctttatatacatttttaaatggcgatgaatctaatgcatcaatatttttaatgtgtgtactgtgaagcacagctactactgggattgactcaggtgttaagttgaaaataggtgctgtatacacattacggtcactgaaaaataaatccccatgttgatatagttgtttaatgaaaaatgcgcctaattccgtttcattattaaagaaatattgtttgttagcatagtaaacaataattttttgtacttctggtttgccatccttgtaagaaaaatacttttctaattttgtgtcaccttctggattatagaaaaattcacataatgtttgttgtttatcaacaagaatcctactacaacttaaaaagccacgcacatcataaaaatcacgttttacttttcgtctttgactatcaaaatgattcacataatctaatatacgatatttaggatcttgaaaatgggcatacattaagaaacgctcttgatcatatattctaaagtcatgactattttcaacatgttttaaagtataatgacattcatcagtccaatacgacaaccagtcaaatggttcattgcgttctaaatatgttgcttcttggaagaaatcatacatattaatatagtcagaactagtaatataattttgggcatttctatataaatatctattccatgacagaaatacacattgcgctggtcttcccatttctttaaataaatttaaacgattaataattgctttttctatcccagttaaattaacacctaaactattacctacaaaataattcatttacaacaccacttatatctattttttataattatatcacataatatttaattacttcttttaactggatgatgtgtttatttataaaacaacaaattttgatatttataatgatagtagttattcaatcaactacgaccaatatatcattgtagagcttaggatattgatttatgcctcaggcacatcaaatgagaagatttataaaagagatatacaactctagaaggtataataaaaacgcgcaactaatgttacgcgtttgaattaatcatatgatattatttgcgatactttaatttagcgaaagcatcatgttgatggatagactcttcattacgacattcgatatcgaaaccgtctaaccaatcaaattcaactaagtccgcggcaattaaacgaattaagtcttcgacaaaacgtggattttcatatgcacgctctgtcacacgtttttcatcaggacgttttaaaatagggtatagaattgaacttgcattagcttccattgcatctaaaattttgtttttatagtcatcaactatgttttgatctttattaatatatgttttaacagtgacaacaccacgttggttgtgcgctgaatactcacttatttcttttgaacaagggcatagcgttgtgacagttgcttcaatagtaagttctttacgtgtaactttatcaccgtcaattgctaatccataagtgacatcggcattaccaactgctttaatatttgtggttggactatagcggtcaaagaaccatttcccagaaacatcaacgcctgccgcattttgtttcatattcgtttgtaaagtgcgtaacacctgataaagtgtattaaattcaagttcaataccattatcatagtgcttttcaacactttcaattatacggctcatattaatacctttttcgtcttttgttaaacttgttgaaaaactaaatgtgccagctgtttgatactggtcaacaagtacagggtacactaagtttttaataccaacttcttctatttcaaataaaaaatctttatgtgtactttgtaaatctgtcatttcgttcttagtagtaggtttcgtgccttcaataggatctacggaaccaaagtgtttccaacgaccttctcgtgtcgataaatcaaattcagtcatttttttcctccgttaagatttaaagtgatatgtccaatatggttcgactgttaaaaagctgtgttgtttaccatcgatttcaggacttgctaattgttttaaaaatggacctgtttgagaagcatgtgcttcaaatgccttaattttaagttctttaaaatctgtaatatcattttgaatatcaggttctccaagagcttcggttgcatcattactgaacgcaactaaagttaaacgagggcgttcttctttaggcatgcgttcaaccgttcgaattacagcgtctgctgttgcttcgtgatcaggatgtactgcatatccaggataaaatgaaataatcaatgatggatttgtatcatcgattaaagatttaatcataccatctatatgttcgtagggttcaaattcgacagttttgtcacgtaaacccatttttcttaaatcagtaataccaataactttacaagcttcttctagttcacgctcacgaatacttggtaatgattcgcgtgttgcaaatgggggattacctaaatttctgcccatttgtcctagggttaaacatgcatatgttacaggtatgcctttttggatataacttgctaatgtgcctgcagatgagaaggtttcatcatcaggatgtggaaatattactaatacatgtctttcgtcagtcatgttgatgcctcctctataaattaaatggtcgctcactaatttgaagtgctgcagcgagttgaccttcgtaattaaaacctgcaattaaaaattcatcatgttcattgacctcaaaatgcgttagaccttgtacataaacccaaccaccatttgatagtttaagaccaatgcgataaggttctttattaccaccttttagttgtgcatgcgtatatgttacttgtatgtttcttaaaaatgtaccagcattaaaaacacgttgatcgaaatggttcgcataggccccatttgtcgtttcaacatgcagatacacaggtttatgttcaaaagaagcaagtaaatctataacttcttgttctttaattggttccaacacgttcactccttacactatcaatgtgtttatctttctattttactaaaaactattcgataattgtatacgattgctcaattatttataaattaattttcatgaagggtaattactcaggattacgtaatcatacagcattagttttttacttttaaaaatcaaaaatttgttggaatttgaaaagtgttaaacattaaaaatgatgctatattaatggtgtatgaatgaattcataagtttttaaaatgtattaaatttgtggaggcatgtaaacaatgaaagtattaaacttaggatcgaaaaaacaagcatcattctatgttgcatgtgagttatataaagagatggcatttaatcagcactgtaaactaggtttagcaactggtggtacaatgacagatttgtatgaacaacttgttaagttattaaataaaaatcagttaaacgtagacaatgtatccacgtttaatttagacgaatatgtaggtttaaccgcatcacatccgcaaagttatcactattatatggatgacatgcttttcaaacaatatccttattttaatagaaagaacattcatattccaaatggagatgccgatgatatgaatgcggaagcgtcaaaatataatgacgttttagaacaacaaggtcaacgtgatattcaaattttaggtattggtgaaaatggtcatattggatttaatgaacctggtacgccgtttgatagcgttactcatatcgttgatttgactgaaagtactattaaggctaatagtcgatattttaaaaacgaagatgatgttccaaagcaagccatttcgatgggacttgctaatattcttcaagccaaacgtatcattttactcgcatttggtgaaaagaaacgtgctgctattacacatttattaaatcaggaaatttctgttgatgttccagccacattacttcacaaacacccgaatgttgagatatatttagacgacgaagcttgcccgaaaaatgttgcgaaaattcatgtcgatgaaatggattgattgcaatgtttaattaagaaatgcctcgggaaaggttccaatagaaagataaaaagcattggaaggatgatttttagtggaattacaattagcaattgatttattaaacaaagaagacgcggctgagttagcaaataaagtaaaagattatgtagatatcgtagaaatcggtacgccaatcatttacaacgaaggtttaccagcagttaaacatatggcagacaacattagtaatgtaaaagtattagcagacatgaaaattatggatgcagctgattatgaagttagccaagcaattaaatttggcgcggatgtaattacaatactaggtgttgcagaagatgcatcaattaaagcagctattgaagaagctcataaaaataataaacaattactagttgatatgattgctgttcaagatttagaaaaacgtgcaaaagaactagatgaaatgggtgctgattatattgcagtacacactggttatgatttacaagcagaagggcaatcaccattagaaagtttaagaaccgttaaatctgttattaaaaattctaaagttgcagtagcaggtggaattaaaccagatacaattaaagatattgtcgctgaaagtcctgatcttgttattgttggtggcggaatcgcaaatgcagatgatccagtagaagctgcaaaacaatgtcgcgctgcaatcgaaggtaagtaatatggctaaatttagtgactatcaattaattctagatgaattaaagatgactttgtcacatgttgaagcggatgagttttcaacttttgcatccaaaatactacatgctgaacatatatttgtagctggcaaaggacgttcaggattcgtggcgaatagttttgcaatgcgcttaaatcagctcggcaaacaggcacatgttgttggagaatcaacgacacctgcgattaagtcgaatgatgtatttgtaattatctctggttcaggttccacggaacatttaagattattagcagacaaagcaaaatcagtaggtgctgacatcgtattaattactacaaataaagattctgcaataggcaatctagctgggacgaacatcgttttgcctgcaggtacaaaatatgatgaacaaggctcggcacaaccattaggaagtttgtttgaacaagcatctcaattatttttagatagtgttgtaatgggattgatgactgaaatgaatgttacggaacaaacgatgcaacaaaatcatgctaatttagaataaaataaagatagtcgataatatgatgcctaggcagaaatattatcgattatttttttatttaaataataaattatagtataatatcaataataaacgaataggggtgttaatattgaagtttgacaattatatttttgattttgatggtacgttggcagacacgaaaaaatgtggtgaagtagcaacacaaagtgcatttaaagcatgtggcttaacggaaccatcatctaaagaaataacgcattatatgggaatacctattgaagaatcatttttaaaattagcagaccgaccattagatgaagcagcattagcaaagttaatcgatacatttagacatacatatcaatctattgaaaaggactatatttatgaatttgcgggtataactgaagccattacaagtttgtataaccaagggaaaaaacttttcgtggtgtctagtaagaagagtgatgtattagaaagaaatttatcggctattggattaaatcacttgattaccgaagctgttggatccgatcaagtaagtgcatataaaccaaatcctgaaggcatacacacaattgtgcaacgctacaatttaaatagccaacaaacggtttatattggtgattcaacatttgatgttgagatggcgcaacatgctggtgtaccatctgcagcagtaacatggggagcacatgatgcaaggtcattacttcattcaaatccagattttataatcaatgatccatcagaaattaatacagtattataaaatttgttaaaacagagaataccatggttaaaatgcatattcataaatattagattatacatagaaatatttcgctttagattaggaatgtaaaataaatatttattaataatcgtgtatgtttaaagagtgatgtctgattcgttgatcatttatttttgtacaaataaattaaagtaaaaacaaagttattgaagtaaatcgaatataaacattttaatatgatgaggaaagtagtgatagcatatgacttacatgaagttgtgtgctatcgctatttttagttataattccaaaaagttaatcgttcgatgatttaagaattattattgtttaattcaaatgtatgagggtataaaatcattgaatttaattcgataaagtgaaatttttgaacaaacatacttttgtatttatataaaagtttaaattcttataaatttgacaaaactaattaactccgtataattatgaaacatacaagagggagtgtatgaattcatggattttaataaagagaatattaacatggtggatgcaaagaaagctaaaaaaaccgttgttgcaaccggtatcggtaatgcaatggaatggttcgattttggtgtctatgcatatacaactgcgtacattggagcgaacttcttctctccagtagagaatgcagacattcgacaaatgttgactttcgcagcattagccattgcgtttttattaagaccaattggtggtgtggtatttggtattattggtgacaaatatggacgtaaagttgtattaacatctacaattattttaatggcattttcaacattaaccattggattattgccaagctatgatcaaattggactttgggcaccaatactattattgcttgcaagagtactacaagggttttcaacaggtggagagtatgcgggggcaatgacatatgttgcggagtcatctccagataagcgtcgtaactcattaggtagtggactagaaattgggacattatcaggttacatagctgcttcaattatgattgcagtattaacattctttttaacagatgaacaaatggcatcatttggttggagaatcccattcttacttggtttattcctaggattattcggcttatatttacgtcgtaagcttgaagaatcaccagttttcgaaaatgatgttgcaacacaaccagaacgagacaacattaactttttacaaatcatcagattttattacaaagatatatttgtgtgttttgtagctgttgtattcttcaatgttacgaactatatggtaactgcatatttaccaacctatttagaacaagttattaaattagatgcaacgacaacaagtgtattaattacttgtgtcatggcaataatgattccattagcattaatgtttggtaagttagcggataaaataggtgaaaagaaagtatttctaattggtactggtgggctaacattatttagtatcatcgcatttatgttattacattcacaatcatttgttgtaatagtaatcggtatatttatattaggatttttcttatcaacttacgaagcgacaatgccagggtcgttaccaacgatgttttacagtcatataagatatcgaactttatcagtaacatttaatatctctgtttcgatatttggtggtacgacgccattagttgcaacatggttagttacgaaaactggagatccattagcacctgcgtattatttaacagcaatcagtgttattggctttttagttattacattcttacatttaagtacagcaggaaaatctctaaaaggttcgtatccaaatgtagataacgagcaagatagagcttattatgcagaacacccaaaagaagcattatggtgggttaaagaacgtaagaattagagattttaataaaaagtataaatcaatcgtatataagcactttaaagctagtaggttctgctaactttaaagtgctttttaaattgagaactgtaattagccgtaataaagtttttgtatatacataaacccccactgcaatgattatcgcaatgggggaaagaggggacttaaagcatatgtttagctttgaatacttaaaattctcttgctattgaaatgttaggatgtaaatatgtcttagagtattttgtccaacgcaattaatattgagactctaaccttcaatattattatagagaacacaaacttaaatagattgggtgacttatttgtgtcagttattgcgattgcgataacttcttttctctatatacatatagtaacgtcttatctaataaaaaacatggtactacagtatcaaatttatctagggcttaagtttgatttttataataggcaggtttacctgataaaaatacttattcattatataatgttaacaagatgtattttaaagtttacattgagtgagggatattgatgaacgtaattttagaacagttgaaaacacatactcaaaataaacctaatgacatagcattacatatcgatgatgaaacaattacatatagtcaactaaatgcccgcatcactagcgcagttgaatctttgcagaaatattcacttaaccctgtcgttgctattaatatgaaatcaccggtgcaaagtattatttgttatttagctttgcatcgtttacataaagtgcctatgatgatggaaggtaaatggcaaagtactatacatcgtcaattgattgaaaaatatggtattaaagatgtaattggagatacaggtctcatgcagaatatagactcaccgatgtttattgattcaacgcaattacagcactaccccaatttattacatattggttttacttcagggacaactggactgccaaaagcatattatcgtgatgaagattcatggttggcttcttttgaagttaatgaaatgttgatgttaaaaaatgaaaatgcaatagcagcccctggaccactatcgcactcgttaacattatatgcgttattgtttgctttaagttccggtcgtacttttataggacagaccacttttcatcctgaaaagttacttaatcaatgtcataaaatatcatcatacaaagttgctatgtttcttgttccaacgatgattaaatcattattgttagtttacaacaatgaacatacaatccaatcattttttagcagtggagataagctgcattcttctatttttaaaaagataaaaaatcaagcaaatgacataaatttgattgaattttttggtacatcggaaaccagttttatcagctataacttgaatcagcaagcaccagttgaatcagtaggtgtgctatttccaaatgtggaattgaaaacaacgaatcacgatcacaatggtataggaactatttgtataaaaagtaatatgatgtttagtggctatgtaagtgaacaatgtataaataatgatgaatggtttgttactaatgataatggctatgtaaaagagcagtatttatatttaacgggacgtcaacaggatatgttaattattggtggtcaaaatatatatccagcacatgttgaacgccttttaacgcaatcttcgagcattgatgaagcaattatcatcggtattccaaatgagcgttttggtcaaataggcgtattgctttattctggtgatgtgacacttacacataaaaatgtaaaacaatttttaaaaaagaaagtgaaacgctatgaaattccatcgatgattcatcatgtagaaaagatgtattacactgcaagtggtaaaattgctagagaaaaaatgatgtcgatgtatttgagaggtgaattataatatgaatcaagcagtcatagttgcagctaaacgaactgcatttgggaaatatggtggcactttaaaacatttagagccagaacaattgcttaaacctttattccaacattttaaagagaagtatccagaggtaatatctaaaatagatgatgtagttttaggtaatgttgttgggaatggtggcaatattgcaagaaaagcattgcttgaagcggggcttaaagattcaatacctggcgtcacaatcgatcggcaatgtgggtctggacttgaaagtgttcaatatgcatgtcgcatgatccaagccggagctggcaaggtatatattgcaggtggtgttgaaagtacaagtcgagcaccttggaaaatcaaacgaccgcattctgtgtacgaaacagcattacctgagttttatgagcgtgcatcatttgcacctgaaatgagcgacccatcaatgattcaaggtgctgaaaatgtggccaagatgtatgatgtttcaagagaattacaagatgaatttgcttatcgaagtcatcaactgacagcggaaaatgtaaagaatggaaatatttctcaggaaatattacctataaccgttaaaggagaaatattcaatactgatgaaagtctaaaatcacatattccgaaagataactttggccgatttaagcccgtaatcaaaggtgggaccgttaccgctgcgaatagttgtatgaaaaatgatggtgcagttttattgcttattatggaaaaagatatggcatacgaattaggtttcgagcatggtttattatttaaagatggtgttacggtaggtgttgattctaattttcctggcattggtccagtaccagccatttccaacttactaaaaagaaatcaattaacgatagaaaatattgaagtcattgaaattaacgaagcgttcagtgcacaggtagttgcctgccaacaagctttaaatatttcaaatacgcaattaaatatatggggtggtgcattagcatcaggtcatccatacggtgcaagcggtgcccaattagtgactcgattattttatatgtttgacaaagagactatgattgcatctatggggatagggggaggtctaggaaatgcagcattatttactcgattctaaccagcgattaaatgtgtcattttctaaggatagtgtggctgcatattatcagtgttttaaccaaccttatagaaaagaagtaccaccattaatgtgtgcgtcattatggccaaaatttgatttatttaaaaaatatgcaaatagcgaactgattttaacaaaatcagcaattaatcaaactcaaaagatagaagtagacacaatatatgtagggcatttagaagatattgaatgccgacagactcgcaatatcacacgttatacaatggctttaacattaactaaaaatgatcaacatgtcataacggttacacaaacttttattaaggcgatgaagtagagatgaagtttaatgagatatggataaatgaatatttggcgctcgtaaatgatgataatccaatacataatgagattgtgccaggacaattagtgagtcaaatgatgctgatggctatgtcattagagacaaaccagtgtcaaattaactacgttaaacctattttaataaatgaaaatatcgaattcattgaacaacacgaacacgaaattatagcaattaatgacgatggagagattaaaataaaaatttctttgagcacaaaaaaataaccgatattagctgcatgaacgcatattaattaggagatgaaaggacagctaatatcagttatgtattgttattattattgggaacagagatgaatataggttacgtttctttctttgcacggggatgcattaatctaaaataataataacaactatatcaatgtttaataaattctggattattggaacgattagtcaatttaactaactttcatatgatctatatcgtcttgtaataaagagagcaatttgaatatttcagtatcactaaatgaatcgtcacatttaattgaaacatgctgaaacgttttggttataatttcataaactggtgcgccttcatggtgatactgtcgataaataatcataacctatattacctcctttgctactctatggttatattataaataacatttttatgtgtgacatcaaccttaagtatcaactttttatcagacatagaacgtatgatttactaagactatttatgtataaaagttctaaataaatatatatttatagagtcgcctggcagtcatttgggaaatataacatatatgattagagaggcatctatcgcaaaagaatgataatgatagaggtattgagcatatagatgagtttaagttcatcttgaaaataaagggttatttagtcatagatgtagatgtataggaaatatttgtatgtattgttcgatatgtatgaaattttcaataaaagctaataacgcttatatgtaactttcaaatttaaattatatacagagcatgatgattataaaaaaataaccacatcacataaattgagttcatacccaatttaagtggtgtggctaataatgttgatttatagatgaaccgcctaatcgttaaacctctgttacttcaacatcgatatgttcaatacggttgtatgcaccgtgatccacaggaccaacaaaatcattcattttccaaccgtttttaatagcagaagcgacgaaagctttcgcgctaatcacagcttctttcggtgacttaccgttagctaaatatgcagttgttgccgcagcaaatgtacaaccagcaccatggttataactttgttggaacatgtctgttgttagttgataaaatgtttgaccatcatagtataagtcatacgatttatcttgatctaaagctttgccacctttaatgatgacatgctgtgcgcctttatcaaagataattgttgcagcctttttcatatcttcaattgaatttaatttacctaatcctgataattgacccgcttcaaataagtttggtgtcactaccgttgctttaggtagtaaatatttaatcatcgcctcagtatttccaggattaagcacttcatcttcgcctttacaaaccatgacaggatctactacaaaatattgtgcattagatgcctcatatacttctccagcacgtttgattatctcctcagtacctaacatacctgttttaatagcatcaggtccgattgataaagccgtttcaagttgtttttcaaatacatccattggtaatggtgtaacatcgtgtgaccatgtatctttatccatagtaacgatggcagttaaagcgaccatgccatacgtatctaattcttggaacgttttcaaatctgcttgcatacctgcgccagcacttgtgtcagaaccggcaattgttaaaactttctttaaagccattgagcttcactcctacataataatattgtattcatcatatcatttttaacctaattgaaaaatattaagcattcaatatttgatgattgttgaaatgaatcattcatactattgtaacttttgaaaatgtcattcactttagataagtgtgatatgttaaaatatgtcctgaggtgagattgaatggaatggtcgcaaatttttcatgacataacaacgaaacatgactttaaagctatgcatgattttttagaaaaagaatattcgactgcaatcgtataccctgatagggaaaatatatatcaagcgtttgatttaacaccgtttgaaaatatcaaagttgttatattaggacaagacccgtatcatggtccaaaccaagcacatggattagcattttcagtgcaacctaacgcaaaattccctccatctttacgtaatatgtataaagaattagcagatgatattggatgcgttagacaaacaccgcatttacaagattgggcaagagaaggcgtcttgttattgaatacagttttaaccgtaagacagggtgaagcaaattctcatcgtgatattggttgggaaacatttactgatgaaattattaaagcagtgtctgattataaagaacatgttgtctttattttgtgggggaaacctgcacagcaaaaaataaagcttatcgatacatctaaacattgtattataaaatcagtgcatcctagtccactgtctgcatatagaggattctttggatcaaaaccgtattccaaagcgaatgcctatttagagtcagtaggaaaatcaccaattaattggtgtgaaagtgaggcgtagatggtgaatagagaaactttaatagcacgaattgagcaagaattagtacaagcagagcaggcacagcatgaccatgactttgaaaaacatatgtatgccatacatatattaacatctttatatgcttcaacatcaaatacaccacatattggtgaacaacaaatgaatcgtcgtattgctaaccataatcaaatgccacaatcacaaataacgcagccaactcatcaagtgacagctgctgaaattgaagcgatgggtggtaaagtaaatacgcattcagcacatcatcataataagtcatattcacaaccttcaaaccaacaacaaagattagcgacagatgatgacattggcaatggtgaatccatatttgatttttaaaaagcaacaatgaaacataattacttaatagcttgttaagtatgttggttaataatcaagacgcatatacttttattcgagtgttcggatttaaacatttattaatactgaattatataaggagaggtagcaatgaaattatttattattttaggtgcattaaacgcgatgatggctgtcggaacaggtgcatttggtgcgcatggtttacaaggaaaaataagtgatcactatttatcagtatgggaaaaagcaacgacgtatcaaatgtaccatggcttagcattattaattataggtgtaattagtggtacaacttcaatcaatgttaactgggctggctggttaatatttgctggtattattttctttagtggatcattatatattttagtattaactcaaattaaagttttaggtgcgattacgccaattggtggcgtattgttcatcattggctggataatgttaatcattgcgacattcaaatttgctggttaaattttaaaactttagattacctatgtaactaaacattaaatttttaataaaaataatcaagaaaaagagttacaaactcatcttttgggtatagaataccttcgaggtgagtttttatttatggaaaaaaagaataagcaaatagatagaggcgatttaaaacaaaacctatctgaaaagtttgtatgggcgattgcatatggttcatgtatcggatggggcgcattcatcttaccaggagactggattaagcagtcaggtccgattgcagcatcaattggtatagttattggtgcattattaatgatattaattgcggttagttatggcgcattagtagagagatttccagtatcagggggcgcgtttgcctttagtttcttaagtttcggcagatatgtgagtttcttctcatcatggtttttaacttttggttatgtctgtgtcgttgctttaaatgcgaccgcattcagtttactagttaaattcttattgccagatgtcttaaataatgggaaactatacaccattgcgggctgggacgtttatattacggaaatcattattgcgaccgtattactacttgtattcatgctagtaacgattcgtggcgcaagtgtatctggatcattacaatattatttctgtgtggcgatggtaatcgtcgtattattgatgttctttggttcattctttggtaataattttgcacttgaaaatttacaaccgttagctgaacctagcaaaggatggttagtgtctattgtggttattgtatccgtggcaccatgggcatatgttggatttgataatattccacaaacagcagaagagtttaactttgcaccaaacaagacatttaagcttatcgtgtacagtttattagcagcatcattaacttatgttgtcatgattttatacactggttggttatcaacaagtcatcaaagtttaaatgggcagttgtggttaacaggtgctgttacacaaacagcatttggttatattggattaggtgtattagcaattgcaattatgatgggtatatttactggtttaaatggattcttgatgagttcaagtcgcttgttattttctatgggacgttcaggtattatgccaacaatgtttagtaaattacatagtaaatacaaaacaccatatgtcgcaatcatattcctagtaggtgtgtcgttaattgcaccttggctaggaagaactgcattgacttggattgtagatatgtcatctacaggtgtatccattgcctactttattacatgtttgtctgcagcgaaattattcagttataacaaacaaagtaatacgtatgcaccggtttacaaaacgtttgctattatcggctcatttgtatcattcattttcttagcgttgttattagtgccaggttctcctgcagcactgactgcaccatcttatattgcattgcttggatggttaatcatcggtttaatattctttgtgattcgatatcctaaattgaaaaatatggataatgatgaattaagtcgcttgattttaaatagaagtgaaaatgaagttgatgatatgattgaagaacctgaaaaagaaaaaactaaataataaaagaatcgcacaatataccttcttcattcggaggcgtatcgtgcgattttttgtattataaattgacatttaagacgaggcagctgaaccttatatataattgctaagagtttgggctgagccatttctaacaatatttataatcgtttaaaagatttcacgaacccagaaacaattaatttggaaatttggtcggcgaataataaacctaatgcgatggcgcctgcaataagtgttacttctaacatggtattgattgctgtgctgaaatttaataagactaaattttttgtagcatcgtatgctaatccacctggtactaatggaatgatacccgttaccataaaaatgatggcaggttctttttgtttacgagccatataatgacttaacaagcctaatgctaaactaccaaagaaactagagtatatagtgtgcacattaaagccgttgaagaataaggtgtaaaccatccatccacatgtaccaacgaaaccacatgatagatataattttctaggtgcatcaaaaatgacgcagaagaacattgaagctaaaaagctaaagataaagtttaagatccaaaacatagtctgatactcctatactaaaattaatacgctaccaacgccagcaccgatgccaaacgcagtaaccaatgcttctaatgatttcgttgtgaacatcaacatgtgtccaccaaataaatcttgtattgcgtttgttattaatacaccaggaacaataggcatgactgccgcaatgataatagttgccaagtcacctgttgggataagtgtatgtccaataacggcgataatcccaataactaatgaaccaatgaattctgggataaactgtgcatgtaacttgcgatctaaaatctcagtgactaggtatcctagactacctgctaatatcgcagttaaaacatcaatcaatctaccaccttgtaaatataagaaactcattgcaatcattgctgcagcaaaacctttaaagggaagactgctgtcacgcttagcaacatatattttttcaagttgtgtttttgcttcggctaaagaaatttcattatttgtaatttgacgcgaaattttattagcttgcgaaatttttattaagtttgtatctcgagaggtaattctaaatattctaggaaacgattccgaatgtaacgtaaactggatgacagtgtttgtaacaaagctgttactttcactgtaaccaagtttttttgcaatacgtgtcatggtatcttctacacgcgtaccttctgcaccagattctaatagtatgcgagcagcaagcatgacaacgtctttgataagtacctcttgtttgtattcttctgaatttatgtccatttcatcaccattgtttataagaatttaatactcattatagtttatacactataaaataaccacatgagctttttgataagttgttattgattttaaaaaactaatatttgatactattgtaataataatcattggaatttttagtagttaaaattctcttgaagtataaaaagggaaaattattgaaaaaaattcgacaaaaatatgtttcaaatatttcaaataggttaaaataatattagttaaccattacaaaaattgtatagagtagcgactgtataatttctattgaggttaacgtttatatgtagtgatagtagttaaagttctcccaaggaagactactcgggtacactttgctatgagcaaagtgtactttgttattgataatacattagcacatatatataagtttaaacatacagatttcaactatttaccaaatcacgtcttatgtatacgggaatatactgaagataaacgaaaaattccaagcttaaaccgataagcttggaatttttttattaatttataaacgtaccaatgtattaagaaatcgcaaagaattgatcgaattcgtttgtgttaataagatgtcctacaaagaaactaccgaattcaccgtatcgtgctgttgtttcatcaaagcgcatttcgtatacaatttttttgaattgtaatacgtcatctgagaacaatgttacgccccattcgaaatcatcaaaccctacagaaccagtaataaattgtttgattttgccagcatattttctaccaatcataccatggtcatacattaatttttggcgttcttccatagttaacatgtaccagttataagtttcattacgacgtttgttcattggatagaaacaaatataatcagaatgtggtaattctgggtataatcttgctttgatatgagggttctcataaggatcttcatcagatttaccagctaaataattgctcaattcaatgactgatacatatgaatatgtagggattaggaagtcagcaatgcgcaatttgttaaattcattttcaatatgatttaaagacttcatttcaggacgtaagaaccataataacaaatctgctttttgaccagttatattataaatagcttgatcaccagattttgatgatcttacagttgctgtattttctaaaaatgattgaaattcagtgacaagtgcatcgcgttcgtcctttggaactatacgtaatgatgcccaatcaactgcataaaataaatgtagactataccaaccatctaatgtttcggctgcttgactcatgtttatcgctccttttcaaaaatcatcagttctttataaattttatcataaagcaaaggggtaacgataaaattatgattacaaattggtgacgtggcattatgaaataaaatggcgtataattataccgtgaatgattaataagatttatattacaggaggacattatggctgatttattaaatgtattaaaagacaaactttctggtaaaaacgttaaaatcgtattacctgaaggagaggacgaacgtgttctaacagctgcaacacaattacaagcaacagattatgttacaccaatcgtgttaggtgatgagactaaggttcaatctttagcgcaaaaacttgatcttgatatttctaatattgaattaattaatcctgcgacaagtgaattgaaagctgaattagttcaatcatttgttgaacgacgtaaaggtaaagcgactgaagaacaagcacaagaattattaaacaatgtgaactacttcggtacaatgcttgtttatgctggtaaagcagatggtttagttagtggtgcagcacattcaacaggagacactgtgcgtccagctttacaaatcatcaaaacgaaaccaggtgtatcaagaacatcaggtatcttctttatgattaaaggtgatgaacaatacatctttggtgattgtgcaatcaatccagaacttgattcacaaggacttgcagaaattgcagtagaaagtgcaaaatcagcattaagctttggcatggatccaaaagttgcaatgttaagcttttcaacaaaagggtctgctaaatcagacgacgtgacaaaagttcaagaagctgtcaaattagcacaacaaaaagctgaagaagaaaaattagaagcaatcattgatggcgaattccaatttgatgctgcgattgtaccaggtgttgctgagaaaaaagcgccaggtgctaaattacaaggtgatgcaaatgtctttgtattcccaagtttagaagctggtaatattggttacaaaattgcacaacgtttaggtggatatgatgcagttggtccagtattacaaggtttaaattctccagtaaatgacttatcacgtggctgctcaattgaagatgtatacaatctttcaattattacagcagcgcaagccttacaataacgatggatttagcgagtaaatattttaatggcgtcaactggcgatatatcgaccattcttctggattagaacctatgcaatctttcgcattcgatgatacattttgcgaaagtgtgggcaaagatatatcagataatgttgtgcgtacttggattcatcaacatactgttattcttggtattcatgattcaagattgccgtttttaaaagatggcattgattatttaacgaatgagattggttataatgccattgttagaaattctggtggcttaggtgtcgttctagatcaaggtgtattaaatatatcgctgatgttcaaaggacaaacagaaacaacgattgatgaagcgtttactgtgatgtacctcttaattagcaaaatgttcgaagatgagaatgttgatattgatacgatggaaattgaacattcttattgcccaggaaaatttgacttaagtatcgatggtaagaaatttgcaggcatatcgcaacgaagagttagaggcggtattgctgtacaaatttatctttgtgttgaaggctctggttcagaacgtgcattgatgatgcaaacattttatgaacatgctttaaaaggtgaagtgactaaatttaaatatcctgaaattgaaccatcttgtatggcctcattagagacattgcttaacaaaacgattactgttcaagatgtaatgtttttactattatatgcaatcaaagatcttggcggtgtattaaatatgacgcccattactcaagaagaatggcaaagatacgatacgtattttgataaaatgattgaaagaaacaagaaaatgatagaccaaatgcaatagttaaatatttaacagcccctttcaagttatcgtttggggctgttatttttgaaagtatccataaaaagcataaatatgttattgacctaatatttaaattgaacatcattaaattaaaagtaatgatatgatggaaataataaatttaataagaaaatttcatgttttacgtattaaatagattgagaatagggtatatataatgcgtatgactatgaaagaaacgaccttctattgaaatgttctaatactttagtagtaaatctatatattccaattattatttgtagtattatagttagggtggaaaattataaattgtagggctattttataaaaagataaagaatctgaaatatcactcgataagatttaaactttgaagtaaacgaaagttagttttatactaatcaagttaagtcaaatataaattcaaaataaagattatacataatatgaataatgtgagataaagactgcaatgaaatttaacgcgaatgcgtatgcaacttagaatatgatgtcttttactaataaataaaaataatgaatcaagtataggataaatataaaaggtgatattgacatgacaagaaaaggatatggggaatcgacaggtaagattattttaataggagaacatgctgttacatttggagagcctgctattgcagtaccgtttaacgcaggtaaaatcaaagttttaatagaagccttagagagcgggaactattcgtctattaaaagcgatgtttacgatggtatgttatatgatgcgcctgaccatcttaagtctttggtgaaccgttttgtagaattaaataatattacagagccgctagcagtaacgatccaaacgaatttaccaccatcacgtggattaggatcgagtgcagctgtcgcggttgcttttgttcgtgcaagttatgattttttagggaaatcattaacgaaagaagaactcattgaaaaggctaattgggcagagcaaattgcacatggtaaaccaagtggtattgatacgcaaacgattgtatcaggcaaaccagtttggttccaaaaaggtcatgctgaaacattgaaaacgttaagtttagacggctatatggttgttattgatactggtgtgaaaggttcaacaagacaagcggtagaagatgttcataaactttgtgaggatcctcagtacatgtcacatgtaaaacatatcggtaagttagttttacgtgcgagtgatgtgattgaacatcataactttgaagccctagcggatatttttaatgaatgtcatgcggatttaaaggcgttgacagttagtcatgataaaatagaacaattaatgaaaattggtaaagaaaatggtgcgattgctggaaaacttactggtgctggtcgtggtggaagtatgttattgcttgccaaagatttaccaacagcgaaaaatattgtgaaagctgtagaaaaagctggtgcagcacatacatggattgagaatttaggaggttaatgcgttgattaaaagtggcaaagcacgtgcacatacgaatattgcacttataaaatattggggtaaaaaagatgaagcactaatcattccaatgaataatagcatatctgttacattagaaaaattttacactgaaacgaaagtcacttttaacgaccagttaacacaggatcaattttggttgaatggtgaaaaggttagtggcaaagaattagagaaaatttcaaaatatatggatattgtcagaaatagagctggcatcgattggtatgctgaaattgaaagcgacaattttgtaccaacagcagcagggttggcttcatcagcaagcgcatatgcagctttagcagcagcttgtaatcaagcactagacttgcagctgtcagataaggatttatcgagattggcgcgaattggttcgggttctgcgtcgcgtagtatttatggtggatttgcagaatgggaaaaagggtataatgatgagacgtcatatgccgttccacttgaatcgaatcattttgaagatgaccttgccatgatatttgttgtgattaatcaacattctaaaaaggtacctagtcgatatggtatgtcgttgacacgaaacacatcaaggttttatcaatattggttagatcatattgatgaagatttagctgaagcaaaagcagcgattcaagacaaagattttaaacgccttggtgaagtaattgaagaaaatggtttacgtatgcatgccacgaatctgggatcaacaccgccgttcacttatcttgtgcaagaaagttatgatgtcatggcgctcgttcacgaatgccgagaagcgggatatccgtgttattttacgatggatgcgggtcctaatgtgaaaatacttgtagaaaagaaaaacaagcaacagattatagataaattattaacacagtttgataataaccaaattattgatagtgacattattgccacaggaattgaaataattgagtaaggaagagataaaatgattcaggtcaaagcacccggaaaactttatattgctggagaatatgctgtaacagaaccaggatataaatctgtacttattgcgttagatcgttttgtaactgctactattgaagaagcagaccaatataaaggtaccattcattcaaaagcattacatcataacccagttacatttagtagagatgaagatagtattgtcatttcagatccacatgcagcaaaacaattaaattatgtggtcacagctattgaaatatttgaacaatacgcgaaaagttgcgatatagcgatgaagcattttcatctgactattgatagtaatttagatgattcaaatggtcataaatatggattaggttcaagtgcagcagtacttgtgtcagttataaaagtattaaatgaattttatgatatgaagttatctaatttatacatttataaactagcagtgattgcaaatatgaagttacaaagtttaagttcatgcggagatattgctgtgagtgtatatagtggatggttagcgtatagtacttttgatcatgaatgggttaagcatcaaattgaagatactacggttgaagaagttttaatcaaaaactggcctggattgcacatcgaaccattacaagcacctgaaaatatggaagtacttatcggttggactggctcaccggcgtcatcaccacactttgttagcgaagtgaaacgtttgaaatcagatccttcattttacggtgacttcttagaagattcacatcgttgtgttgaaaagcttattcatgcttttaaaacaaataacattaaaggtgtgcaaaagatggtgcgtcagaatcgtacaattattcaacgtatggataaagaagctacagttgatatagaaactgaaaagctaaaatatttgtgtgatattgctgaaaagtatcacggtgcatctaaaacatcaggcgctggtggtggagactgtggtattacaattatcaataaagatgtagataaagaaaaaatttatgatgaatggacaaaacatggtattaaaccattaaaatttaatatttatcatgggcaataaatgatttgataggggagcaatcatctaatttaattagaagataaatgctccattttttattgccagccgtgttacgtatcttgaaaaaaatattaaaaagagtaaaatagatagagttaacgaaaaaattaatgaaatcgacgatatagatatgataaagaaaggtgggtagcaatatgaaaaatacattccttatttgtgatgaatgtcaggcagtcaatataagaacgttacaaaagaagttggaaaaattagatcccgatgctgaaatcgtgataggttgtcaatcttattgtggacctggacgccgaaaaacattcacttttgttaataaccgcccactggctgcgcttactgaagaagaattaatcgaaaaagtttctcaacaattaaagaaaccacgtgatcctgaagaagaagagcgtttaagaaaacgacatgaagaacgtaaacgtcgtaaagaagaacaagatagaaagcttaaagaaaaattagaaaagcgaaaagcacaacaataaaacctgatggcagcatcattcaatgcgtgccaccaggtttttatgttttgtctagaaattaaataaatcattaaatgattcggccatcgtaggatgtgtataaatattatctcgtaatacggtatatggaatgttttgatcaatcgcaagtttaattatattaattaattcttcagattgcttaccatataatgtagcacctaaaatcatattattttcattattaatgactactttaaataaacctcttggatcattgttaattttgtgacgaggtatagcacttactaaaagttgatgttcagtgtaatcataatgttgagcggcagcttctttactagttaatccaacacgtgataatggtggatctataaatactgtataaggcacgctacctctattgtcagtcgtacgtgactgattaccatataacgctgatttgataattcgataatcatctaaagatatatacgtaaattgaagtccgcctttaacatcacctgcagcataaatatgtggcacagatgtttgaagttgagcattgactttaatttcgcctctatcacctaattcgatatcagtattttctaaagctaaggctgtattcggtttgcgcccgatagccaaaagtactgcatcagcctcaaagttgccaacattagtacggactgttgtatgatgatcgtcagatgacaattcagtcgtttcaacatttgtatgcaatgcaatgcctttattttctaagtcagtaatagcatgtgcaacgacatcttgatcttcgcgtggcataaatgattcaccacgttctaatactgttaccttactacctaaattcgcaaacattgaagcaaattctaaggcaatataaccgccacctacaataacgagatgcttaggttgatagctaatgtttaataaacctgttgaatcgaagacatgtttagcttgatcaaggccttttatgttaggaatgatagaggtagcaccggtattaataatgatatgaggtgcagtaatactatcgacgatatcgccatgctgatctaataaattcacttcagtattagatttaaactgcgctttaaaatccaatacatcaatgttgttatcgtctgctaataagtggtaatttttattgtttagcgcattgacaacatcgtttttacggttataacttgcttcaaaagatttgccttctaatccatcatgtacaagtgtcttcgaaggtatacatcctatatttatacaagtgccgccatacattttcgaagattgttcgataactgcgacgtgttgacctgttgatgcagcatatttcgctaaagttttaccagctttcccaaatcctattacaattaaatcatatgttttcatgacataaatcctccttttgaatgtcttcaatgacatctttgattgttttttcattataaaaattaataatgatattctgttcgtcttgctgataatgtgacatggtagttgcaatattacgagcaatttgacagtgactgccttcgtcgccagtaaatagacgtgtgtggtgttctttctctaagacaaaatgtttatataatgttgctagagagacatcagcactttgatcatttgctaaataaccgccatctttacctcgtattgtgtcaatcatttttaaatcgacaagttgagtcgtcacgcgtcgtaattgaacaggatttaaacaagttaattctgctaatgaactactattgaatttttctgaatgatgcttagttaaaaaagctaatacatgcacggcaatgttaaattctaaattcaatgtttctcacctcataattgtaactgtattagttacaattaaaaatcattttgctcaatgtgtcaatacttatgtttgaaaagtgttgaattaggtgtggttattgtgatgatttattgtttgaaagttgatgcattaacggtgagattgcacaattgaaattttaattatgtatgaactgatagatatgaaatgaatattgaaaatgagagcaataaaattttgaatgatgatgttgtgtgattgtataaacttattcgtattttagatacgttttgatatttcgcatgatgaggaaatacttttaacaactgatgacatattttaatagtgaatatattttgagatattaatatatttaatgttaaggatgttgtcgcaataaaattaaaatattgaaagataatttttattgattaattgcgaatatacaaagacaccattatatccatatgctaaaataagaaaaaaggcgacatgttatctcaatttacctgcatctagactcctttacataagaaataatcatcgccgagttttaaaattttacaactttgtagatgtaaaaagcatttgattttaaatagtttgaaaatcatatatttttgaaaaaggagcatgccgatgagtattgacatgtatttagacagatctcgaaaccaagcttcaagtgtggggaatttgagtcaaacaatgaattcaaattatgatgcgttggaaaaagcaattactcaatttatcaatgatgatgcgcttaaagggaaagcgtatacgtcagctaagcaattttttagtacggtgttaattccattatcaacaagtatgaaaacattgagtgatttaacgaagcaagcttgcgataattttgtgtcacgttatacgagtgaggttgatagcatatctttaaaagaatcagagcttgaagaagatatcagatcattaagtcaacaaattacgcgatatgaaaatttaactaacaatttgaaaaagcatgcttccgataatcagcaagccatttcatcgaaccaacaaataatacaaacattaggtcaacaaaaacatgaattagaagagaaactacgtaaattacgtgagtttaatcaaaaatcaccagaaatatttaaagaagttgaagaatttcaaaaaattgtccaacaaggacttacccaagcgcagaatttttggaacttttcaacaaatcaatttaatataccttcaggtaaagaacttgattgggctaaagcaagtcatgaaaaatatttgaaagttgctatggggaaaattgaacataaagcagagaaagaaactttaaataaagcagactttgctgttataaaggcatatgccaaagaacatccagaagacgatatcccgaaaagtataatgaaatatataaatgacaataaagatagtattaaacgagatataggattagatattacgtcaacacttttagagcaaggcggtataaatgcaagtaaattcggtgtatttatcaatacagcaggtggagtgaaaggcccagccggtccaaattcatttgtggaagtcaaacgtacatcaggtaatgtgtttatagaaaatggtagtaaatttgcaaaaggcggaaaatatctagggaaaggtgttgcaggtgtaggatttggtataggtatgtatgatgatcttgcaaatgataataaaacatttggagaggcattgtcgcataatggtatgacgcttgcagctggatctgttgcagcatttggtgtagcggctttagtaagtaatccagtcggttgggctgtggtaggtattttaacagcaggtattattggatctactgtttctgattatctttatcaaaataattattttggcataaaagataaagtggactgggcaggacataaaatagacgagggtattgatgctgtaaacaaaactgcagaaaaagctgtagatagtgttggtaatgccattggtgatgccacaaaaagtattagtaatcatattaatcctatgaaatggagttggtaaatattgctttgcgaatctaaagttattaataaaaatcctaaatatcgaataatcaaatacgaaagtgaatacttaatgattgatttagcaagtaattggattgttttcttctttccatttattaactggctcataccgaaaacatatgtcaaaatcactaagaatgattatgaaaaattaaatattgtcaaaccagttaaaaataaatcgataggatggactatattcgcgggtattgtgttacttggtggtactgtaagaagaaatacttatttatttgattttcaattagaaaaactaattgtttggagcagctgttttattggttttttaggggttatatttttttattgttatctaaataagaaattaacattaaatgtttataaggaaaataaaaataatgaacttaaattaagattattaccctcctttaaaaatatgtgtttcacaattttttattacctctttactggtttcatgtcttatggggcattttacttgttggtgtttgaaaatgtacaaaatttaatcttatatatttcttggcttttcatgactatgctatttatgttaatgaatatgcactcaattatagataaaaaagtacatatatttttaaagtctaataaatagttacaaatttagttggttttcaattgctaattagggggtgtaaacattgctgtgcgaatctaaaatcatcaataaaaacccaaaatatagaattattaaatataatgatgagtacttaatgatcgatataataagcacttggattagtttattttttccttttattaattggttcatccccaaaagatacgtcaaaattagtagagaagagtttgaaaatttaaatattgttaaacctgctaaaaagaatgttttttggccagttgctagtatctctactttattcgcagttacattaagaaagtatacgcttttacttgacactcaacttgataaaaaattagttattgccatatgttgcaccacatttatagggattttaatattttatgtacgcctaattaaaaaatcatctttaaatatttataatactaaaaataaaaggtcgaaaatcatcttaataccaacactaaaaaatttttgtttcacattgttcggatatgtttttttaattttttggacagtgattttctcatatgctctattatcaatgagttatcaaaacataatagtatattttgcttggattacagcaataataggtttttttctagtgaatatagctttaattatagataaaaacattcatgtcatacttaaaaattaaatggtggtaataaattcagattaaagatatgcaaataacaatgaataaaatttttaatgatagtaagttgataatattttaatgtcttttgaagtatcgaaaaatgtattacacataaaattaaagggatgtggagacattggtttgcgaggtaatagctatatacaaaaatcccaaatatagaattattaaatataatgatgaatatttgatggtgaatataataaataattggttagttttattcattccattgcttaattggttgacaccaaaaagatacatcaagatcagtcaagaagaattagaaagtttaaatactttcaaacctgctaaaaacaatgcattttggccagcattaggtagttcagttttatttagtgtgacttttagaaagtatatgcctttatttaatgttagattggaaaaaacaatagtaatagccatattttttgttgtatttcttggtattttatttttctacctaaatttaaatcgtaggctagcattaagtgtttttactatgaataaagaaaaaagtcagaaaatgatattactacctaatttaaaacattttttctttataatatttgcatatttatatttcggtggtttttcatttttcactttatatgccctgataactatagatgttcaaaatataattatatttatctgttggggtgcagtaactatgtttttcttttttataaacattgttcccattggcattaaaaaagctcatgtaatacttcttaaaaaagctgaataataaatgagttttttaaatctaaaattattaaatttaatataaaaatttgactcatagatagaatgaataaaaatccgaaatatagaattatcaactacaaagatgaatattttataatggatatcccatgttaatattaacagttttaatttctttgttatgcaaatcaaaacattatagtatttctaattaaatttgcaatggctttaatattgtcgttcttaaatgtttttcaatttctgattcaaaagtacatgtaatttaaaggtcaacgagcaatcgcgctatatgcatatcaacttaagcaatacttattttaactgagttctacataacatttttctaatacaccgccttaattcaaaccctaattctaacatttggaagttgtattaaatcatgatagtgtgatagtggaaaagttataaagataaggagctgggtctaatgaagcaatttgtaaacttaggtaaatctgatgttgaagtgtttccaatcgcacttgggacgaacgcagtaggtgggcataatttatatccgaacttagatgaagaacaaggaaaagatgttgttcgtcaagccattaatcatggtattaatttattagatacggcatatatttatgggccagaacgatcagaagaattggttggagaagttgttaaggaatatccgcgagagcaaattaaaattgctacgaaagggtctcatgaatttgatgaaaatcaagaagtacatcagaacaatcaaccggaatatttaaaacaacaagttgagaatagtttgaaacgtctacaaactgattatatcgatttatattatattcattttcctgatgacaacactccgaaagatcaagcagttgcagcattacaagagcttaaggaacaagggaagattaaagccattggtgtatcaaatttcacattagatcaacttaaagaagcaaataaagatggttacgttgatgttgtacagttagaatataatttattgcaccgcgaaaatgaggcagtattgcaatattgtgttgatcacctaatcacatttattccttatttcccattagcatccggtattttagctggaaaatatgatgagaacactaaatttagtgaccatcgtactacacgtcgtgattttatacctggtgtttttgaagagaatgtgcgtcgcgtaaaagctttggaaagcctagctgcagcacatcaaacttcaattgcgaacattgtattagcattttatttaacgagaccagctatcgatgtgattattcctggtgcaaaacgtgcagaacaagtcattgaaaatattaaagctgcagatatcgttttatcagatgatgagattcaatatatcgatgaattgtttccaattgaagactaaatgaattgtatttaatggtgatatcaggctgggacataaatcaatgttctatgctctacgaagttatattggcagtagttgactgaacgaaaatgcgcttgtaacaagcttttttcaatcctagtcaggggccccaacacagagaatttcgaaaagaaattctacaggcaatgcaagttggggtgtgggccccaacacagaagctgacgaaaagtcagcttacaataatgtgcaagttggggtgggacgacgaaataaatttttcgaaaatatcatttctgtcccactcccatcacaaacgacgttatataaggcatgacgaaatttcgtcaaatttatataaaagttgtaagcgttttactattcggtaggcaaagcttatgatagtataattaggtaacgaaaaacacagatatttattaatcaaaagtgaggttaggctaaaatgattactgttttgtttggtgggagtagaccaaacggtaatactgcacaattaacaaaattcgctttgcaagatttagagtatcaatggattgacgtgacacaacatcagtttaaaccgatacgtgacgtgagacatacagcagagactattacttcatatgacgatgactatttgccgattctagataaaatattggctagtgatacaattatttttgcatcaccagtgtattggtatagcatttcagcaccattgaaagcatttatcgaacattggtcagaaacattacaagataaacgatatcctaattttaaggcacaaatggccgaaaaggattttagagttattttagttggtggagattgtccaaaaataaaagcgaagccagcaattacgcaaatgaaatatagtttagactttttaggtgccactttaaatggttatattattggaactgctgaaaagcctggtgacatcatgaaagacaactatgccttagcacgtgcaactgagtggaatagtatattgcaataagacatacctcatactaaacgaagtgattttttgcttcgttatttttatttttaattttaacggaaaatataaatatataaattgaatagacaatcattgtttattaagtattgagcaagttgtggtataatgccgttattaaaacttgttaataaggggagaaagtcatgttcaaggtaagacaagcaactgaaaaagatgttgttcaaattagagatgtcgcaactaaagcttggtttaatacatacttaaatatatacgctgcgacaacagttaatcacttgttagaagcttcatataatgaacatcatttaaagaaaagacttcaagaacaattattcttagtcgttgaagaaggtaatgacatcgttggctttgctaactttatttacggtgaagaattatatttatcagctcattatgttaaaccagaatcgcaacatacaggttatggtacagcattgttaaatgaaggattatcacgttttgaagataaatttgaaggtgtttacttagaagtagataataaaaatgaagaagcagtagcttactataaagagcaaggttttacaatcttacgctcttatcagccagaaatgtatggcgaaaagttagacttagcacttatgtacaaagcattttaagtaaattaaatattatattaaacgaaaaggaggggaataatgactaacgcatatgtagatttaaaattagtagaagaaaaagtttttaaagatccgatacatcgatatattcatgttgaagatcaattgatatgggatttaattaaaactaaggaattccaaaggttacgtcgaattagacaactaggaacactgtacctatcttttcacacagcagaacatagtcgctttggacattctttaggtgtgtatgaaatagttagacgattaattgatgagtcatttattggtcatgatgcatgggacaataaagatagaccgttggcattatgtgctgcattattacatgatttaggacatggtccattttcacatagttttgaaaaaatatttaatacagaccatgaagcatacacacaagcgattattactggagatactgaggtgaatgctgtattacgtaaagtgtcgcctgagtttccaagagaagttgcggaagtaattaataaaacgcatcataataaattggtcatttcgatgatttcgtcacaaatcgatgcggatagaatggattatttacaacgtgatgcgtatttcacaggtgtatcatatggtgcttttgatatggagcgtattttaagattaatgcgaccttctaaagatgaagtactaatcaaagaaagtggtatgcatgcagttgaaaactttattatgagtcgttatcaaatgtattggcaaatttacttccacccagttagtcgtggtggagaagtgctgcttaataattgtttgaaacgcgcaaaacagctttataatgaaggctatgaatttaagttgcatccacatgattttattccattttttgaagagacagttacgattgaacaatatgttgaactcgatgaagcggtagttacgtattatttggaaaaatggacaaaagaagatgatgccattttaagtgatttagcaagtcgatttattaatcgagacttatttaaatatattccatttgatggctcaattattacaatatcagaactgcaagaactgtttgaagcaggtggtattaatccagattattattttgtgagtgaagcattttcggatttgccatatgactatgatcgaccggggtcaaatcgcaaaccgattcatttattaagacaagatggtacgattagagaaataagcaatcaatcattagtcattcatagtattacaggcattaatcgccaagactataaattatattatcctagagaaatggttgcaaagattaaagataagacaattagagaagctattgaaaatttgattaatgagcttaattaaacagggctaaaattgttatcgttaaatatggaggttatatcattgtctgagaaaaaaggctttaattttaatatcataaaaaatgaccctctagatggtcataaaggtacaaatattggttcaattagcttagacaatattgcaccagtttttatcgatgttgctaacaaagaagcatttattgatattggaggcatgcatgctcgtgccaaagttgaaaaaggtgtgaaatggattactgataaagctgctgttgaaggcgatgaagctaaagaatattggttgtgttgggtaacaacagaacgtaatgaacaaggaccatattacgctggtttaacagcgtgctatttattagtgaataaagcaattcgtcgtggttataaaagtatgcctgaacatgttaatatgatggataaatcaatgaaacatcatattatcattgatcaaattggtgacgagaataaagctattttaaaagactttttaatgaaccatgatgaaggtatgtggaagctttcttctgatgctttacatcaagcatttaattaaatattagaaactaaaatttcccaattaatctataaagatatgattcatttctcaatgacgacgtaaatcttgaggtgaaaataaagtcttagattggttgggagtttttttaatttttttgaaattaaattaatctgtagttaataaaaaatttgaataactgacacatttttttgatcatagctatatactttgtgaattaattcacattataataagagtgaagataagagtattataaattatctttaaataaatatatgtgaagtaaaaattacacgttagcatatcgattatgtcatttcttttaacatattaactagggaaacgttaaaagttaacggttgatatctaactaaaaacaaagtcacagtagtatgttttaatctggcgtctattacaaataaaaattacatctataattattcgttttcatttttgaaagtaatcgccaattaatatcatacatactggagtgactataaggaggacattattatgagagcagcagttgtaacgaaagatcacaaagtgagtattgaggacaaaaagttaagagctttaaaacctggtgaagcattggtacaaacggaatattgtggtgtttgtcataccgatttacatgttaagaatgctgattttggtgatgttacaggcgttactttaggtcatgaaggtattggtaaagtcatcgaagttgcagaagatgtagaatcattaaaaattggagaccgtgtgtctatcgcttggatgttcgaaagctgtggaagatgtgaatattgtacaacaggtcgtgaaacactttgccgtagtgtgaaaaatgctggttatacagtagatggtgcaatggctgaacaagttattgttactgcagactatgctgtgaaagtacctgaaaaattagatccagcagcagcgtcttctattacatgcgcaggtgtgacaacttataaagctgtaaaagtaagtaatgtaaaacctggtcaatggttaggtgtttttggtataggtggtttaggtaacctagctttacaatatgctaaaaacgttatgggggctaaaattgttgccttcgacattaatgatgataaattagcattcgcgaaagaattaggtgcagatgctattattaattctaaagatgttgatccagttgcagaagttatgaaattaactgataacaaaggattagatgcaacagtggtaacttcagttgctaagacgccatttaaccaagcggttgatgttgtaaaagctggtgcaagagttgttgccgttggtttacctgttgataaaatgaacttagatatcccaagattagtgcttgacggtattgaagtagtaggttcacttgttggtacaagacaagacttacgtgaagcgtttgaatttgctgctgaaaataaagtaacacctaaagttcaattaagaaaattagaagaaatcaatgatatttttgaagaaatggaaaatggtactataactggtagaatggttattaaattttaaaaatatcaactgactatatagataaagaaggtagtgctctgaacactatcattataatcaaacacgaggttttcatgaaagatagtgaaaatctcgtgtttttttggttttgaggtgttgtttgtattttataaaatggcttacatatatgaagcgttgattaagtatggaattgttaattaattgaacctatttagctttaagaaggcataacaagatgaccttattttatgctataatatttctattatgcgaagattaaggtgagtagtaaattggataaaaaagtaagtattcaaacaaagcaagtgttgaaacagcacaacgaaaaagaaaaatttgaatttactactgaaggaacttggcaacaaaggcaatctaactttattcggtatgtagaacaaattgaggatgcaacagttaatgttacaataaaagtggatgatgatagcgttaagttgattcgtaaaggcgacattaatatgaatttgcattttgttgaaggacaaacgacaacaactttttacgatatatcggctggacgaattccactagaagttaaaacattacgcattttacatttcgtaagtggagacggtggcaagctaaagattcattatgaattatatcaagataatgaaaaaatgggttcttatcaatatgaaattaactataaggagataggcgaatgaatattattgatcaagtgaaacaaacattagtagaagaaattgcagcaagtattaacaaagcaggattagcagatgagattcctgatattaaaattgaagttcctaaagatacaaaaaatggagattatgctactaatattgcgatggtactgactaagattgcaaagcgtaatcctcgtgaaattgctcaagcgattgttgataacttagatactgaaaaagcacatgtaaaacaaattgacattgctggtccaggattcattaatttttacttagataatcagtatttaacagcaattattcctgaagcaattgaaaaaggtgatcaatttggacatgtaaatgaatcaaaaggtcaaaatgtattgcttgagtatgtttcagctaaccctacaggagatttacatattggtcatgctagaaatgcagcagttggtgatgctttagctaatattttaactgcagctggctataatgtaacacgtgaatattatattaatgatgctggtaatcaaattactaacttagcgcgttcgattgaaacacgtttctttgaagctttaggtgacaatagttattcaatgccagaagatggctataatggaaaagatattattgaaataggtaaagatttagcagagaaacaccctgaaattaaagattattctgaagaagcacgtttgaaagaatttagaaaattaggcgtagaatacgaaatggctaaattgaaaaatgatttagcagagttcaatacgcattttgataattggtttagtgaaacatctttatatgaaaaaggcgaaattcttgaagttttagcaaaaatgaaagaattaggttatacgtatgaagctgatggcgctacatggttacgtacaactgattttaaagacgacaaagacagagtattaattaaaaatgacggtacatatacgtatttcttaccagatattgcgtaccacttcgataaagttaaacgtggtaatgacattttaatcgatttatttggtgctgatcatcatggttatattaatcgtttgaaagcatctcttgaaacgtttggtgtagatagtaatcgtttagaaattcaaatcatgcaaatggttcgtttaatggaaaatggtaaagaagtgaagatgagtaaacgtactggtaatgcgattacattaagagaaattatggacgaagttggcgttgacgctgcacgttatttcttaactatgcgtagtcctgatagtcactttgattttgatatggaattagcgaaagagcaatctcaagacaatccagtttactatgctcaatatgcacatgcgcgtatttgttcaattttaaaacaagcgaaagagcaaggtattgaagtgactgctgcgaatgattttacaacgattacaaatgaaaaagcgattgaattgttgaaaaaagtagctgatttcgaacctacaattgaaagtgctgctgagcatagatcagcacatagaattactaactatattcaagacttggctgctcatttccataaattctataatgctgaaaaagtgttaacagatgatattgaaaaaacaaaagcacatgttgctatgattgaagcggtcagaattacattgaaaaatgcattggcaatggtcggtgtaagcgcacctgaatcaatgtaagaacatttatatacactccaacgtagagtttctcgaaagatactttgtgttggagtgtttttaattaggtatgtgacatattggggaatgcttagtatgtgaataaggttaagagggacgcagttggatgctactgcacaactgcataagagagcctaaatcgctaaagctcaaggggagtaaaggaatacagttggcttgcttgcgcagcaactgcataagagcccctaattaatttattaattaggggctctaaaaggagggtgtaaatgttaggaactgatgaattgtataaattgttatataggcatatgggaccgcaaaattggtggcctgctgataatgacattgaactgatgttaggtgcaattttagttcaaaatactagatggcgaaatgcagaaattgcattgaatcagattaaagaacatacgcattttaatcccaatcatatattagaactacctattgaaacgttacaatcattgatacattcaagtggcttttataaaagtaaaacactgacgattaaaacattattaacatggttagcacgacatcatttcaattatcaagagattaatgagcgatataaaggtggattaagaaaagaattattatctttgaaaggtattggaagtgaaacagcagatgtcttacttgtttatatattcggacgtattgaatttattccagatagctatacaagaaaaatatatgataaattaggatatgaaaacactaaaaattatgatcaattaaaaaaagtagtcacattaccaaatcattttacaaatcaagatgctaatgaatttcatgctctgttagatgtatttggtaaacattactttagagacaaagatataaagaattatgattttttagaaccttactttaaaaagtaaacgctgtgaagttagatagatgagtttatatgaaatataaaaaataatttactattttcttttagtatgtggacttatataataaatagaagcatataaagaaaaaaacagttgtttgtttgtgcagcaactgcataaaagcctctaatcactaaaggtgaagaggaacgcagttggatgctaaggcacaactgcataaatccctctaatcgctaaagcgaaaagtgggattaaaaaggagatgtgataatgtgaagaaatcgttaattgcttttattttgatttttatgcttgtcctgagtggctgtggtatgaaagataatgataaacaaggtagcgatgataatggctcgtctaaatcgccgtaccatagaattgtttcgttaatgcctagtaatactgaaattttatatgaattaggattaggtaaatacatagttggtgtttcaacggttgatgattatccaaaagatgtgaaagagggtaagaaacaatttgatgctttgaatctaaataaagaggaacttttaaaggcaaagccagatctaattcttgcgcatgagtcgcaaaaggcaactgctaataaagtattgtcatcattagagaaacaaggcatcaaagtagtgtatgttaaagatgcacaatcaattgatgaaacatacaacacatttaagcaaattgggaaattaacgcatcatgataagcaggctgaacaacttgttgaggaaactaaagataatatcgataaagtcatagattcaattcctgctcatcataaaaaatcaaaagtatttattgaggtttcatcaaagcctgaaatatatacagcagggaagcatacattttttaatgatatgttagaaaaattagaagcccaaaatgtttatagtgacattaatggttggaaccctgtaacgaaggaaagtattattaaaaagaacccagatatattaatttcgacggaagctaagacaagatcagattatatggatatcatcaaaaaaaggggtggattcaataaaattaatgctgtcaagaatacacgtattgaagttgtaaatggtgatgaagtatcaagaccaggtccacgtattgatgaaggattaaaagaattaagagatgcaatttatagaaaataaaccattctaattatgccccttattgctacatgtaaaaaaatacatgtttgagataaggggtttttaaaatatatttagtgaatgatagcaacgcgagtatgtgattgctataatgaatgtaattatcgatgaaagaaaagagaatgctatgacatttaataaagtattattgagctggatagtcatattgattataacaactagcatatatctattttggcagttgggggatatcaatgatgtatttaaccagtctattttaatcaatgttagattaccgagattattagaagcattgttgacaggtatgatattaacagttgcaggtcttatatttcaaacagttttaaataatgcattggcagatagctttacattaggattggcaagcggtgctacatttggttcaggattagcattatttttaggtttaacaacgttatggattcctgtattttcaataacatttagtttgataacattaataactgtattagtcattacgtcggtattgagccaaggctatccagttagaatcttaatattaagtggtttaatgattggtgcattattcaattcacttctatattttttgattttattaaaacctcgcaaattaaatacaattgccaattatttgtttggtggctttggtgatgcagaatactcaaatgtatccataatagcaatcacatttatcattgcactgtttggtatatttatcattcttaatcaactaaagttattgcaattaggagaactaaaaagtcagtcactaggcttaaatgttcaattgattacatatatcgcgttatgtatagcttctatgataacggcgataaatgtcgcatatgttggcatcattggattcattggtatggtgataccacaactcattagaaaatggcagtggaaacaatcattaggaagacaattggctttgaatattgtaattggaggacaaataatggttatggcagattttattggtagccatatactgtcaccagtacaaataccggcaagcattattattgcattaattggtataccagtgttattttacatgctaatatctcagtcgaaacggttacactagcacatgacatttgctaaaataaaaataactataaacataaagagggcataagcgatggatttgaatcaaattaaagcagttgtatttgatttagaaggtacgttgttggacagagttaaatctcgagagaaatttatcgaagagcaatatgaacgatttcatgactacttaattcatgttcaactggcagattttaaaaaagcatttattgagctagatgacgatgaagataatgataaacctgatttatataaagaaatcattaaacgtttccatgtagataggttaacttggaaagacttatttaatgattttgaaatgcatttttatcgttatgtatttccttattacgatactttgtatacactagaaaagctatcgcaaaaaggctttcaaattggtgttatcgcaaatggtaaatctaagattaaacaatttcgattacattcacttggtttgatgcatgttattaattatttatcaacatcagaaacagttggttttcgtaaaccacatcctaaaatttttgaagatatgattgatcaactaggggtattacctgagcaaattatgtatgttggcgatgatgcgttaaatgatgtagctccagcacgagctatgggcatggttagtgtatggtataaacaagaagatgctgaaattgaaccactcgaagaagaagttgattttacaattacaacagtggaagaattattaaccattttaccaataaaaaatgataataaaggagaaaattatggatctatttactagaaaagatggaacatcgatacattacagtacattaggtgaaggctatcctatcgtattgattcatactgtacttgataattattctgtgtttaataaattagcagcacaattagcaaaatcatttcaagttgtgttaattgatttacgtggacatggctattctgataaacctcgtcacattgaaataaaagatttttctgatgacattgttgaattacttaaatatttatacattgaagaagttgcatttgtatgccatgaaatgggtggaatcattggtgcggatatttcagtacgttatcctgaatttacatcatcacttatgttggtaaatccaacatctattgaaggtgaattaccggaagaacgtttatttagaaaatatgcccatattattcgaaactgggatcctgaaaaacaagataaatttttaaataagcgtaagtattatcgtccgagaaaaatgaatcgattccttaaacatgtcgtagatacaaatgaaatatcaactaaagaagaaattcaagcagttaaagaggtattcaaaaacgctgatatttctcaaacttatagaaatgtcgtagtaccgacaaaaattattgcaggagaattcggtgaaagaacaacaagattggaagctaaagaagtagctgatttaatccaaaatgcggactttgaagtatatcaagaatcaagtgcattcccatttgttgaagagcaagaaagattcgtcgaagatacagcttcatttatcaacaaacatcacgatgaaaagcatgtttaatttttagtgataagtgaaatataaaagtagtaattattatttgtaatataattgtaatatgactgttgttttagaaatgattgttgtataatggttgtgagcacaagacgatataaataaaaggagagagtgcttatgaaaaagctactaacggcaagtataattgcatgttctgttgtaatgggagtaggcttagtgaacactagtgccgaagcagcaagtggcaactctattgatactgttaaacaattaattaagggtgatcagtcattagaaaatgtgaaaattggcgaatctattaaagatgttttaactaagtacaaaaatcctatgtattcttacaatgaagatggaactgaacattattacgaattccatactaaaaaaggtatgttattagtaactactgatggtaagaaaaacaatggtaaagtaactcatatttcaatgatgtataatgatgctaatggtccaacatatcaagctgttaaaaattatgttggcaaagcagtaacacatacggaatatagcaaagttgctggtaattttggatatattgaaaaaggcaaaacgacttatcaatttgcctcagcaccaaaagataaaaacataaaattatatcgtattgatttggaaaaataataattaaattaatcgtgcttaaccgacaagttaaatcgcaatacttgtcggttattttattacatggcataatacagtgaatattaatttttatgatttgcgaaggggaaattaaaccaatacaataaataaagatgtttcattttaaaggagtactaccaatgcgtattaacgataaaattttactagaaaatatagaagattactttaatcataaaggtttatcaccgcatttgattgatgatattaaagagaaagtaattactgatataaaaaattctgaaaagaaagatcaagattatattgaatataaaagaaaatctccagcacaaatcatattaatgattcaaaggaatttatttgctttacaaatgaatccagttattttctttattataaacttcattctcatatcctatttatatgataaacagtatgttcagtttcaagctattactggaatgagtctattttattgtttagtgatttttccaatgactattgttgtatacctaagggtgtcacaaaagaattacttgcgtagtaataaaatagaaatgattatgggtacaattatcgctatcatatccttgttattaattatattacaagcatttaatattacttggggcgttataccaattacaaattttggacatcaatttttctttttcattggtattattttagtaattgccggcatattttataagcgacttgagttttcgggaatcggcttattattttgtcaaaaaaccgtcgatgcaatgattcataatccacaatcagcccagattttttcattaattatatggatattattagtagttctagttatatatttcacaattagattatcttcacgtacaagattataaatatgataaaactattcacttgattaattgtattaattgagatgaatagtttttttattgttggaataacttttggtaatttataaataatttaaaaaaattgtttataaaatggaagcgtatatagaatgaaggttgggtatatagtttattgagggaggtgtcacaatgaataaagtcacaattaatcctcaaatccaattaacttatcaaattgaaggtaaaggggatcctataatattacttcatggattggatggtaatttagctggatttgaagatttgcaacatcaactagcatcatcatataaagtacttacttacgatttaagaggtcatggcaagtcttctaaaagtgaatcatacgatttaaacgatcacgttgaggatttaaaaattctaatggagaagttaaatattcatgaggcacatattctaggacatgatttaggtggggtagttgctaagttatttacagataaatatgcttatcgtgtaaaatcattaactaccattgcatcgaagaaagatgacttaatacacagctttactcaattgttaatacaatatcaagatgatatagcgggttttaataagtctgaagcgtatattcttttattttctaaattgtttagaaatcaagagaagacgatgaaatggtatcaaaaacaaagaatatatagcattaagtctgaggatgatagtgcggtggcaattcgttcattaattttgcataaagatgaacctatgtatttaaaaaaacgtacatgtgtacctactttgttaattaatggggaacatgatcctttgattaaagataagaatcattttaaattggaagcgcattttttaaatgttacgaaaaaaatcttcgaacattcaggacatgcaccgcatattgaagaaccagaagcatttatgaattattatttaaattttttaaaaagcgtatcataatatgtgatatataaacctagggcataaagtccttaggcaatgtgaaaaagctgattactattcattatttgatagaaatcagctttttttgaaatgtatttgatatatactgctcgttatgcggctatcttccttatattaagtgccattagtgcaaaacctcttaacaattaggtaaaaaaagacataaaaaaaggaagtttaatagaatgtatcatctatcaaacttcaccaaattgcgctaaacaaaattatagttcaatttcgttgtttgcttcagtgattcgtttatttactcgactcaataatgattcgatttttttacgttgttgtgcattaacaagaattaatacagttctttcatcatgctcattacgttttttatcgaagtaatcttcttgagataaaattttaactgctttaacaacttgtggttgtttgtagtttaaatgattaataatatctttaagatagtattctttctctttgttttcgctgatgtatgtcaatacagcgaattcttcaaagctaattgaaaattcctttttaattaaactttttaatttgtcagcataagtgaccattgataacaactcaaagcaatcattgatttttgtaattgccatgtttaaaacctccctatttgatgcatcttgctcgatacatttgcccgataatatattgatatctaatctttatttattatagatatgttagtcataattttgcattaaataagttttattaaatatatttaatgctctattatttagttaattataactaattaaaaatgagaagtaaacaaaaaagtgtttataaaacaaattattcattagacacagtgattgtatttctgggttagcatttggtttagtcaaaaatatcagcattttttataatttaccttaatttaatcgccaatacaaggtaatttatttaatgaaacgatttagcgcaattaaatgtttcgatattcaatgtgtgtctaaagagattctttgttatagcttaactcttccaagttaacttcttctactatttatacccatttttcagaattttatcactaaaaatgaaaaatttttataatttttttaatttagtaattctcagtgcagttttaatgataagaaaaacacattaatttagtgattaaaaccaatctatagcacgttaaagtgtatatacgttattccgattgataacgggtaacaaataatagaaagtacgataattgatcatgcattaaagcacttttatttttcaaactcgactcaatgaattataaaaagttgtgcattttgacttatttttaattaattgaataaccaactatgaaatattagcacgaataacataatttttgctattaatttggtgtaaattattaaaaaataacattaatttaggtcttaagaatgagttgactatcgaatttgctaaattaaaatttgttgtgtcaaagtatactacccaaatcaacgcttttctaaagatttttagaccacaaaaaaatagcttatcacttttaaaaataattacaagttaaaatgataagctaaaagttaatttaaaataatcttaaaagtataatgcctgtcaaaatacataatagaccaatagtttttctggatgtcattgctattttaggtgaaccaaataatccaaagtgatctatcaatatgcccattagaatctggccaaacatcccaataagtgttgttaatgctgcacccatatgaggcattaagataatgttagctgttacaaaagccataccaagtataccgccagtaaaatagataggctttaatttaccgaattttaaatgacttgtttttagttttaaagaactattaaaaatagcggttaaaatcaatagcgttattgacccaattgtaaatgatactaatgatgcaaaggctggtgaatgagtatgacttgctaaagcactattaattgtcgtttgaataggtggaaagaaaccaaaaataaatcctaagagaagccaaaacagtaaatacttttgatcagttagtaataaattattcttgttaaattgattcattatgacgatgccgacaatgagtaacaatactccaattgctttaattaaattaaaatcatgaattgtagcgccaaataagccaaatgtatcaataatgacacccataataatttgacccgcaactgttgcaattacagttaatgttgcacctaattttggcaataacaataaattgccagttaaaaagctaaccccaagcaaaccaccgactacccatgtgtagttaaatgattgattattgtaaaagtgaatagtaaatacttctggattgataatgatatttaaaataattaaacaaattgttccaactgaaaatgaaatgaatgaagtatagaaaggcgatttagtatacagtgatagtcttgaattgacagatgtttggataggaataagcattccaactaggacaccaatgatatagaaaagaagcatatgaataaagtctcactttccaaagttaataataaaatcatatgaatacattatcattatagagaaaatatacaactcatttacaataatgttgaaaaaaacaggacattatcataacaaaatcaccctagacaatcatgatgaaagtctagggtgttagtatttatactaaattaattgcgctttctttatatctatttcttatcttcaaataaaacagttgttgttttatcaataatttgagcagaatgtactttggtgatagtaccactatttgactttataatatttaaatctactaatgcattcatactatcacgtgcaacttgctcggtcactacgttgtttaattgtggtaattgcagttttacaggcttgtctagtgaagatttaaaacttaattcaagtgttttagtcatgaatatgtcctcctgattaaattgataaagatttgatgagttcgatattgttatatgtttctccagtaagtcgctcaataagtttgctgaatgttttaatttggtcgtttgatgcatcagggttaatgttagcgaatcgacgcttaaattctgtttgtttgccgttagcgtctactttagtaaatgataatacaatagtgatgtggtttattttactcatattttaaaacctcctttcacactatatatcgaaataaaataataaaatggctaattttattttctatgtttaaaatctataaaaaaggcaatagatatatgtaactaaaatataaaatagctatgattaagacacttaaagcaaggggaggttgagtaatgaataaagtagaagcgattaaatttaatgatgatattgttaaaatgtatgaagcgctcaagataaaatctgaacgtgactatttattctttaagttagctatacatagtggattgaaagtatcagaattattaacaattacagtctctcaagttaagagactaattgaaaagtgtacgttatcagaaatgtgtaaagcacattttcattcgttgattaaaattaggttaccagaaacattatcgaaagaactacttcaatatatagaggacaggagtctttcgaatgaagacgttctttttcaatcactacgaacaaatcaagtattatctagacagcaagcatatcgaataattcaccaagcatcaattgaagctggtatagataatgtaggactaacgacattgcgtaagacatttgcatatcatgcttatcaaaaaggtatacctataccagtcattcaaaagtatttagggcatcaatctgctattgaaacactaaattttatcggtttagaaaatgagtgtgaacatagtatttatatttcattacaattatagaaacaaaggaggctaataatgagtttggtttatttattaattgctatacttgtgattatggcgatgatacttctaatgtctaaacgtagagcattggctaaatatgccgggtacatagcgttggttgcacctgtaatttcatctatctattttttgattcaaataccatcagtagctaaactgcaatatctttctacctctattccatggattaagacattagatattaatttagatttacgtttagatggtttaagtttaatgttttctcttattatttcacttattggaattgcagtattcttctatgcaactcaatatttatcctctcgaaaagacaatttaccaaggttttatttttatttaacgttatttatgttcagtatgattggtattgtattatcagacaatacgatattgatgtacattttttgggaattaacgagtgtatcatcatttttattgatttcatattggtataacaatggtgacagtcaatttggtgcgattcaatcatttatgattacagtatttggtggattggcgttattagttggttttattatgctgtatatcatgacaggaacgaataatatcactgacatattaggacaagcagatcatattaagaatcatggattgtttatccctatgatttttatgtttttattaggtgcatttacaaaatcagcacaatttccatttcatatttggctacctagagcaatggctgcacctacacctgtaagtgcttatttacattcagccacgatggtaaaagctggtatctttttattacttcgatttacaccattattaggtcttagcaatatgtacatatatatcgtcacgtttgttggtttaataacaatgttatttggttcaatcacagctttaaaacaatgggatttaaaaggaatcctagcatattcaacaatcagtcaactaggaatgattatggcaatggtcggtatcggtggtggatatgctcaacaccaacaagacgcaatagcatctatttatgtatttgtattatttggtgcgctatttcatctaatgaatcatgccatctttaaatgtgcgcttttcatgggagtaggtattttagatcatgaagcaggttcaagggatatacgaattttaagtggaatgcgtcaactatttcctaaaatgaatctagtcatgacgatagcggctctatctatggctggagtaccatttttaaatggatttttaagtaaagaaatgtttttagatgcattaacacaaactggacaattatcccaatttagtttgatttcaatgatagctatcgtgtttgttggtgttattgctagtatttttacattcacatatgcactttacatggttaaagaagtattttggactaaatatgattctaaagtgtttactaaaaaaaatatccacgaaccatggttgtttagtttaccctctcttatattaatggtgctagtacctgtaatcttttttgtgccaaatatatttgggaaggggattatcgttccagcattaagaggtgtatcaggtggtaatcatcaaattgatccattggcaccacatgtttcgcaatggcatggatttaacataccgcttcttttaaccatcatcattattttattgggtagtgtactagcaatcaaagtagattggaaaaaagtgttcacaggtaaaattagacagatttcagtttcaaaagggtatgagatggtatatcgacattttgaaaagtttgctacgaagcgatttaaacgtgttatgcaagatcgtttaaaccaatacattattatgaccttaggcatatttatgattatcattggatatggttatattcgaattggacttcctaaagtacatcagttacatgtttctgaatttggggcattagaaattatattagcaatcgtaactgtcacaattggtatttctttaatttttatacgtcaacgactgacaatggtcattttaaatggagtcatcggatttgttgtgaccttattctttatagcaatgaaagcccctgatttagcattgactcagctagtagttgaaacaataacgacgatactatttattgtcagtttttcaagattaccaaacgtaccaagatctaacgctaacaaaaaaagagaaataattaaaatttctgtatcactcttgatggcacttattgttgtatcattaatttttattacacaacaaacagatggtttatcatcaatatcagacttttatttaaaagctgacaaactaacaggtggtaaaaatattgtaaatgcgatacttggtgactttagagcattagatacattatttgaaggattagtgttaattattactgggctaggtatttacacattattaaattatcaagatcggaggggacaagatgaaagagaatgatgtcgtgttaagaacggtcacgaaacttgttgtatttattttattgactttcggattctatgtcttcttcgcaggtcataataatcctggtggtggctttattggtggtttaatatttagttcagcgtttattttaatgtttctggcttttaatgttgaagaggttttagaaagtttaccgattgattttagaattttaatgattattggagcattggtatcatctattactgcgataatacctatgttttttggaaaaccatttttgtctcaatatgaaacaacttggatacttccaattttagggcaaattcatgtaagtacaataacactttttgaattaggtattttattctcagttgttggtgttattgtcacagtgatgttgtcgcttagcggaggtcgatcatgaatttaatattattactagttataggatttttagtgtttataggaacatatatgattttatcaatcaatttaattcgtattgtaatcggaatttcaatatatactcatgctggtaatctcattattatgagtatgggaacgtatggttctagtagatcagaaccattaataactggtggaaaccaattgtttgttgatcccttgttacaagctattgtactaactgcaatagttatagggtttgggatgactgcgtttttacttgtacttgtttatagaacttataaagtaacaaaagaagatgaaattgaaggcctaaggggggaagatgatgctaagtaacttattgattttaccaatgttattaccattcctttgtgccttaatccttgtatttttaaaaaataatgatcgtatttctaaatatttatacttaggtacaatgactatcaccacaattatttcattaatgctattaatttatgttcagcgtcaccgtccaattacgctagactttggaggatggtcagcgccctttggtatacagtttttaggagattctttaagtttgattatggttacaaccgcttcgtttgtgattactttaattatggcatacggatttgggcgtggcgaacataaagcaaatcgttatcacttgccatcgttcatattatttttaagtgttggcgtgataggctcttttctaacatcagatttatttaatttatacgtcatgtttgaaattatgttactagcgtcatttgtactcattacacttggacaatctgtagaacaattacgtgctgcaattatttatgttgtcttgaatattattggttcatggctattcttattaggtataggtttactttataaaacagtaggtacattaaacttttcacatattgcaatgcgtttgaatgacatgggagataatcgcactgttacaatgatttcattaatcttcttagtcgcatttagtgcgaaagcagcgctggtcctttttatgtggctacccaaagcctacgctgtgttaaatactgagcttgcagcattatttgcagcgttaatgaccaaagtaggggcctatgcattaattcgattcttcactttactatttgatcaacataatgatctcatacatccattgctagcaactatggctgctataactatggtcatcggcgctataggtgtcattgcttataaagatattaaaaagattgcagcttaccaagtcataatctcaataggatttatcattttaggtttaggaacaaacacgtttgcaggtattaatggtgcaatattttatttggtaaatgacattgttgtaaaaacattgctattctttattattggtagtttagtttacattacaggctatcgacaatatcaatatttgaatggcttagctaaaaaagaacctttatttggagttgcgtttattataatgatttttgctattggcggcgtgcctccatttagtggctttccggggaaagtacttattttccaaggtgcattgcaaaatggcaattatattggactagcgttaatgattattactagtctaattgcaatgtacagtttatttaggatacttttttatatgtattttggagataaagatggggaggaagttaattttaagaaaatcccgctatatcgaaaaagaattttaagtattttagtagttgtggttatcgcaatcggaattgctgcacctgttgtgttaaatgttacaagtgatgcaactgagttgaacacgagtgatcaattatatcaaaaacttgtaaatccgcatttgaaaggagaggactaaatgaatcaaatagttttaaatattatcattgcattcttatgggtattatttcaagatgaagatcattttaaattctcgactttcttttctggatatctaattggtttaattgtcatttatatattacacaggtttttcagcgatgatttttatgttagaaaaatatgggtagctattaaatttttaggtgtttatttatatcaattaataacatctagcattagcacgattaattatattctttttaaaacaaaagatatgaaccctggattactttcatatgaaacaagactaacaagtgattgggcaataacatttttaacaattttaattattataactccagggtctacagtaatacgaatttctcaagactctaaaaagttttttattcatagtatcgacgtgtcagaaaaagaaaaagatagtttgttaagaagtattaagcattatgaagacttaatattggaggtgtcgcgatgatacaaacaataacacatattatgattattagttcactcattatttttggaattgcattaatcatctgtttatttagattaatcaagggacctacaacagcagatcgtgtcgttacatttgatacaacaagtgctgtcgtaatgtcaattgtgggtgtgttaagtgtacttatgggcaccgtttctttcttagattcaatcatgctcattgccattatatcttttgtaagttctgtttcaatatcacgctttattggtggggggcatgtgtttaatggaaataacaaaagaaatctttagtcttattgctgctgtgatgttgttgttaggtagttttattgctcttattagtgcaataggtatcgtgaaattccaagatgttttcttaagaagtcacgctgcgacaaaaagttcaactttatccgtgttattaactttaatcggtgtattaatttattttattgtgaatacaggatttttcagtgtgcgtttattactgtcacttgtttttattaatttaacttcaccagtcggcatgcacttagtcgctcgcgctgcttatcgcaacggcgcttatatgtatcgaaaaaatgatgctcacacacatgcatcaatattattaagttcaaatgaacaaaactctacagaagcattacaattacgtgctaaaaaacgagaagagcatcgtaagaaatggtatcaaaacgattgaagtgttggctaaattgttaagcataacaatgcttttgaaaatctgttttcaaaattaatcattaaaagagtactttgaaattggttagtcgattttaaggtgctcattttttgtattataagttaatgttgttatgtgaaagcaagttgtttatttatacaaacaattagtgataaaataaaattaaataattgcaaatttaagtactgcaatcgtagacatatatctatattaaagtgcttttgtggtcgctaactcaatttatcctctaaagtataattacaacgagatgtgatacttaattttcaattaaacaatactttttagagaggtgaaagtttggaaatatttgaaacaattcttatatttatagctgttgtgatactaagttcgtttgtccatactttcatacctaaagtacccctagcatttatacaaattttcttgggcatgttactatttattaccccaatccctgttcaatttaattttgattctgaattgtttatggtaacaatgattgcgcctttgttatttgtagaaggtgttaatgtttctagagtccatttaaggaaatatattaagccagtgatgatgatggcattaggattagtcattactactgtgataggtgtaggtttatttattcattggatttggccagatttacctattggagcagcatttgcaattgctgccattctttgtcctactgatgcagtagcagtgcaagcaatcactaaaggaaaggtcttgccaaaaggagcaatgacaattcttgaaggtgagtcattattgaatgatgctgctggtattatttcatttaaaatagctgttggagtattagttacaggtgctttttcacttgttgatgctgttcagttgtttttaattgcatcaattggtggcgcagtggttggtttacttataggtatggcattagtaaggttccgattaacattgatgcgtcgaggatatgaaaacattaatatgtttacaattattcaattgttaacaccatttgttacgtatttaattgctgaattgtttcacgcatcaggaatcattgcagcagtagttgcaggacttgtacatggtttcgaacgtgacagaattatgcaagtacgtacacaactgcaaatgagttacaatcatacatggaatatactaggttatgttttaaatggctttgttttttcaatattaggatttttagtacctgaagttattattaaaattatcaaaacagaaccgcacaatttaatctttttaataggcatcactattgttgttgctttagctgtctatctatttagatttgtttgggtttatgtcttatatccttatttttatttagccatcagtccattccaaaaaatgatgactaaaaatgatgatgataatccaacgactgagaaaccaccaaagcgaagtttatacgctttaattatgacgttatgtggtgtgcatggaacaatttctttagcaatcgcattaacgttaccttattttttagcagggcatcatgcttttacgtatagaaacgacttattatttattgcatctggtatggttattattagtttggtagttgcgcaagtattattgccattattaacgaaacctgcacctaaaacagtaattggcaatatgtcgtttaaagttgctagaatttatatattagaacaagttattgattatctaaatcaaaaatctactttcgaaacaagttttaaatatggtaacgtgattaaagaatatcatgataaattagcatttttaaaaactgtagagaaagatgatgaaaactctaaagaattagaacgtctacaaaaaattgcttttaatgtagaaacaaaaacattagagtctttagtagatgaaggacaaataacgaatagtgtacttgaaaactatatgcgttatgctgaaagaacacaggtatatagacaagcatcattaataagaagaatgattgtattattacgaggtgctttattaaaacgaagagtacaaacgagagtgaactccgcatcttcacttagtgttacggataacttaatggaattaaataaaattaataaattagtccattataatgtggttagtcgtttgtctaaggaaacaacaaaagataatacacttgaaattggaatggtttgtgacggttatttaatgcgaattgaaaacttaacaccatcaaatttcttcaactcagcaagtgaagatacgattactaaaattaaattaaatgcattgagagaacaacgtcgcattttacgtgagttgattgatacagatgaagtatcagaaggtacagcgttaaaactaagagaagccatcaattatgatgaaatggttattgtagatagtatgacgtagttcctaattatgctaaaagggattgatgaaaaacggttctccaccaaatgtggtgggtatataatttaaagaactattttaaattacaacttttagagtttttattattaggcggccagtccattattgggcttggttgtcttctttttttctcctttgtataagctgaaaatcatcattatacgtgctttaaagttgttgaaatttctgtaaccaaaagaaattcgcttgattaattttatcttattattaattccttctatagcaccattattaaatgctgggtaataaattgtatttcttaacatcctttgatgttttctataatatttaaccactttccatacacctttactcacagactttttactaactgaatttaaacgattaataaatttaggccaattacataaccttagatcttttcttaatccttggacaagttcgtaggagcgtcgtagtatatcgtcttttgaaagcatgaattctacaatgtcagatgagcgtttataagccttaaaagatttattccatctgtatttactaaatatggttttactagtatccatcaatagaactttccagttattcttaaaaattgtataattaggtccttttttattacggtattcattcataacttgtacacgatacttattaagttccctatttaaatgttgaacgatatggaatctgtcaaaaataatagctgcattaggaaataggtcgcgaaataatcggacatagggttcatacatgtcaatagtaaccgtcttaacttgttgtcgattttttaaatcgaatcgctcgaaataggcacgcaagaatcttgtagttctattttctaaaatatctataacatcatgagtatcattatctataaaaatgaaactcattgatccagttacatttttaacgcttttaaattcatccatagcgatgtgttctggcaaacaattaaacggtttaattcgtaatgaattagccgctttagttctaatacgacttacagtagatggagagatacagttatcttctgcagtatcaatctctgttttaactttagtagcttcttctataactttttgagtaacacatcttgagataaaacacgactcatcaacaattgacgttttagcagtaaaagtgccattgcattctaagcatttaaaacgttgtttagctaagttgaggtatgtgttatacccttgagttttaagtaaagtaatacgagaaacacgcttaccatgtttatgaatttgtccttcatttttaactccacaacaataacaggccgaaggcttatacgttagtacagcattaaccactgttgctttttttcctttgataatgacgtcaatttcttggtttatatattttatattttcatcttttattcttagtaattctaaggtatcattacacataggcgcacttgtctcctttagtttgggtttggtcactttaaattatagaggcaattgcgctttttgtgtattaaaaaaagcaggaagttttaccttcccaccataaaatatgaagaacctgaaaaactgaagggcttttcatcaatcccttttattttaggggaattgaatagatagttttaaactatacgaattattaatatttgagatttaattgaaataagttttaaaaattggaggagatagattaatcgaagtcatttaaagatgaagataagtgcattcacaaaaaatagccacactcatatgacatcggatgagtgtggcttaaggatctatggggggaggaaaccatagatgtttactttgataggccagattaaatatcaaagtatgcgattatttatagcttgatgcaaaagtggtatgcctattaaaagttactgcacatagcttttaatattccgttcaaaggaaaggggcatacaattgaacaatctgtaatagtacttttaaccagctatgctaaaagtctagtagggagaacagttgtccaatcacataagaacctctaacttcgttagtacgattaagaaaagctttttagttagtatgtaatacaatttattgacgcgcgtgaatctcttttataagagtgtgtagggaatggcgttgtataaattgtattagaagaacttctaacgcatctctgtggttaaaagagatgaagggaacgacagtttaattaaaactgcataagaacttctagcttttctctttcgttcaaagagaagcagctgttcgcagtttaatcaaaaccacataaagcttttaactttactctttgatttaaagagtgacaaatgtttacagtttaattaaaactgcataagaacttctagcttttctctttcgttcaaagagaagttctaataccaccatatcgtgcgatcgggaacggtatatatattaataggagggtaatatatatttaacgcacgatatgggactattagccttcgactttgttatgttgatgtgtagcctaaaatattggagataccaatattttaggttgcatcaacatcaattcatcttacttcattaaaacacagcgtgttatttcatgcttccgtgtacagtttcaatatttgatttcatcattttgtagtaagagtcacctttagtgccttctttaccgattgaatctgtgtacacttcaccaaagatatctttcttcgtttcttcagataaactttccattgctttcttatcaacacttgtttctactaataagtgttttaatttgtgctttttaacaaactcaatagcttgtctcatttgttcaggtgtaccttgtttttcagtgttaatttcccaaatataacctggtgtaataccgtattgttttgagaagtacttgaaggcaccttcacttgtaatcatggcacgttgttcttttggaatgtcattaaatttgtctttactgtcattatttaatttttccaattgagcaatgtatttgttaccttgcttttcataatctgctttatgttttttgtcgttatcgataaatgtttgttgaattgtttttacgtatttaataccattatctaaacttaaccatgcgtgtggatcttgtttatctttgttgccttcttcaccgtttaaatagataggtttaacatcttttgatactgcgataacttttttatcttttaatgatttaccagcctgttctaaggctttttcaaaccaaccgttaccagtctctaaatttaatccgttgtataaaataacgtcagcgtcagttaactttttaatatctttaggtttaacttcatattcatgaggatcttgaccaacaggtacaatactatgaatatcgacgttgtctccaccaacatttttagccatatcatataaaattgaattcgtcgttactacttttaatttgccatttgacttatcactgctttgtttaccaccagtaccacatgcagcaactagaagtaataaggctaataataaaggtactaattttttcatgttaaacttcctcgtttctttctattcgtaaattttgtgaaaaataatgtgatgatataaattacaaacgtacaaagtacgattgtcgcaccactaggaatgttgtaaatatagctgtaataaagtccgacaattgaacttatgacacttattaaacttgctataatcatcattgagtatagttttttactaattaaaaatgctgtagatgcaggtgtaattaataatgcaactacaagaataatacctaccgtttgaatacttgctactgttactaatgagagtaacaacatcacaaagtaatgtaataacgtcgtatttagaccactcattctactaaacgttggatcgaatgtagaaatcattaatggacgatagaaaataatgattagaataaggacgattgaaccaatcacaatagttgttaaaaatgcactatttgtgattgccagtaaattaccaaacagaatatggtacaaatctgtcgtagtgtttattaagctaataataataatccccgaagctaagaaagcggtaaaactaattccaatagcggcgtcaggtttcgttttactactagatgtgatataaccgataaaaatacttgcgatcataccagttataagtgcgcctacaaacattggaataccaaataagaatgatagggcaacaccaggtaatactgcgtgactcattgcatctcccattaatgaaagaccacgtaatacaattaaactaccaactgtaccacaaactatccctacaataattgaagttatcaatgctcgattcaagaattgatatgtaaataaatgttcgacaaactctaacatgttatattgctcctttgactagggtcactacagtcagtgctactcataaatgtttcgtttaagcgagtgacactcatagcctcttcactatcaccaaagtatcgtaatgtttgatttaatagaataatgcgatcaaagtattgctttgcttttgatagatcatggtggatgataagaataagttttccttgttgttttaagttctcgatttttgtcatgattaatttttcgctactaaaatcaattccgacaaacggctcatctagaaaataaacttcactttcggacatcaatgctcttgctactagcacacgttgtaattgtccaccacttaattctgaaatttgtcgatgacgtaaagattctaattctaaatcgcttaataactgtttgagtttatcccttgctgatttattaggtcgtctaaaccatccaatttctttgtagcaacctgataaaatcacttgttccacacttataggaaaatctaaatcaatatgtgctttttgtggaatatatgtaatatgttgcagttgttgttgtataggtttgttatataacaatttagtaccggtagcattaaattcaccaattaaagacttgataagggaagatttaccagcaccattcgggcccatgataccaattatttcgccgcgtactggtatcgataaggaaatgtttttaagtacatgcttattacctaaaaacagatttaaatcttttgtttctaacaaacgtttatacctcctaattaaaagtttaggctaacctaattaattgtataataaactgagaatatttatcatgtcaagtaaattcgtgatataatatagacaatgtatgtgaggtgaaagtatgttaactgaagaaaaagaggactatttaaaggcaatccttacgaataatggcgataaaaactttgtgacaaataaaatcttatctcaatttttaaatattaagcctccatctgtaagtgaaatggtaggacgtcttgaaaaagcaggctatgttgaaacaaaaccatacaaaggtgttagattaacagaggatggtttaacgcatacgcttgatatcattaagagacatcgactattagaattatttttaatagaaatattgaaatataattgggaagaagtacatcaagaagcagaaattttagaacatcgaatttcagatttatttgttgaaaggctggatagcctgttaaatttcccagaaacttgcccgcacggcggtgtgattcctagaaataatgaatataaagagaaatatataacaacgattttgaattatgaacctggtgatatcgttacaatcaaacgtgtgagagataagaccgatttgctaatatatttgtctagtaaagatatttctattggtaatgaagtggaaattgtatcgaaagatgaaatgaataaagtaattatcattaaacgtaatgataatgtaattattgtcagttacgaaaatgcaatgaacatgtttgctgaaaaataaaataaagaagccataaagatatccatgattgaactgataaagacatatggataattgctttaggcttcttttttattagttaatttatcaagtgagtatatttgagtaaaatattcactgcataaagattgaagataatccagattgtactataaatgaagataggtacatgactgagttctttaagtgcactaccatcccactgtggactcggacgctggaaagtcaatttagcaatcgtccaactagattgtagaacttcgcctaataatacacctaaaatatattgataactcattgtgacaagtagttgaatttctactatattttcatcttttaatataaaatacaacatgatagaaattaaagttataacaacaatgggtgagccttttctagatgttaaaattaaaaaataaataaatatcaataaataggtaaatataaagaaactaggtatctgataatggctcgacgctaaacctatcaataacataataggtggcattaaataaccaccaatcgttgtaagccattggcctgctagatgtctagattgtgtaattgcgaatccttgttgtaatgtctgttgtcgctctcgtggacttgttacaatgactaaatcttttgcacggccaccagcgagtttattaaacagtacatgaccaaattcatgtgttaaaacagggatatagtttaaaatgacatctaaatagttcaaaacaggcttatgtctatattgatgaatagcaatataacaagctgcaacaataacgataatgtatatattaagttgaattgtcgtattaaaaaagtttgataaataattcattgttaacctcatataagatattaatttaaagtttgcttagcacttattataaatgatattggcatcaatagcgttagactttagacttaccttagttaaactaattttaatttttgaaaaggtgaatatgtgttaaaataaagcaaaatcatttcgatataaataggatgaatataaatactgttaatattgattacactaacataataatgaaataagataggagattcctgttatgactgttgaagaaagatccaatacagccaaagttgacattttaggggtcgattttgataatacaacaatgttgcaaatggttgaaaatattaaaaccttttttgcaaatcaatcaacgaataatctttttatagtaacagccaaccctgaaatagtgaattacgcgacgacacatcaagcgtatttagagttaataaatcaagcgagctatattgttgctgatgggacaggagtagtcaaagcttcgcatcgtttaaagcaacctctagcgcatcgtatacctggtattgagttgatggatgaatgtttgaaaattgctcatgtaaatcatcaaaaagtatttttgctaggggcaactaatgaagttgtagaagcggcacaatatgcattgcaacaaagatatccaaacatatcgtttgcacatcatcacggttatattgatttagaagatgagacagtagtaaaacgaattaaactgtttaaacctgattacatatttgtaggtatgggattccctaaacaagaagaatggattatgacacatgaaaaccaatttgaatctacagtgatgatgggcgtaggtggttctcttgaagtatttgctggggctaaaaagagagcgccttatatatttagaaaattaaacattgaatggatatatagagcattaatagattggaaacgtattggtagattgaagagtattccaatatttatgtataaaatagccaaagcaaaaagaaaaataaaaaaagcgaaatagtcatgatgataaaaataaaaccgaggaaatccttaaatggagattctcggttttttcggtttatttaataacgaagcgggcctcatcgagtttgtttctaaattctttttgttcggctttggatttctttttaaaatcgttaaggaaagcttcatatttaggtaatacatcatcaagttcaccgtaatcttttaactttccgccttcaatccaagcaatcttagtacaaaattgtctcacttggcctaagttatgactaacgaaaaagatggttttgttttgctctttaaactcgtaaattttatctaaacatttttgtgcaaaagtttggtcacctacagataaagcttcgtcaatgactaagatatctggattaactgtgatattaattgaaaaaccaagttttgcacgcataccacttgaatactttttaactggttgataaataaactcaccaagttcactaaattcaataatcttaggtgtcatcgctttaatttcttttcgcttaaagcccatacataacattttaaattcgatattttcaatccctgtaagttgtccactcaagccagcactaattgcgataacgctgacttcaccattacgatccactttgccaacagtaggcgacaaagaaccgccaatgatattgctcaacgttgatttgccggaaccattgatgccaacaagccctatgacgtcaccttcatatgcttttaaactaatgtcatctaaagcgaaaaatgttttgtttttatgtttgggaatgagcgcatctttcatacgttctttatttgtacgataaatacgatattcttttgttacatttttaatgtttaccgaaacgttcatttgtagaccttccttattcacatttatctagattataatatactactcaacagttgttaaattttaaaacctgttgtaaagtgtatagaagattttgttattatcagagttggtgttttgacacaaaatgttaatcatcaatgataacaatgatatttaaaaactaaacttatttcaacttacatgattgtatactataatgtatttgtaataaactaatattttaaagaactagacaataattttgatagcatccatgtatagtgatagtatttacaacaattattataatactatttagttaagtagagaaatagttaaacatttgaaagtgtggtttaatggaatgtcagcaataggaacagtttttaaagaacatgtaaagaacttttatttaattcaaagactggctcagtttcaagttaaaattatcaatcatagtaactatttaggtgtggcttgggaattaattaaccctgttatgcaaattatggtttactggatggtttttggattaggaataagaagtaatgcaccaattcatggtgtaccttttgtttattggttattggttggtatcagtatgtggttcttcatcaaccaaggtattttagaaggtactaaagcaattacacaaaagtttaatcaagtatcgaaaatgaacttcccgttatcgataataccgacatatattgtgacaagtagattttatggacatttaggcttacttttacttgtgataattgcatgtatgtttactggtatttatccatcaatacatatcattcaattattgatatatgtaccgttttgttttttcttaactgcctcggtgacgttattaacatcaacactcggtgtgttagttagagatacacaaatgttaatgcaagcaatattaagaatattattttacttttcaccaattttgtggctaccaaagaaccatggtatcagtggtttaattcatgaaatgatgaaatataatccagtttactttattgctgaatcataccgtgcagcaattttatatcacgaatggtatttcatggatcattggaaattaatgttatacaatttcggtattgttgccattttctttgcaattggtgcgtacttacacatgaaatatagagatcaatttgcagacttcttgtaatatatttatatgacgaaaccccgctaaccattaataaatggaagtggggttcatttttgtttataatttaagtaaataacatattaagttggtgtattatgaacgttttaataaagaaattttatcatttggtagttcgaatactttctaaaatgattacgcctcaagtgattgataaaccgcatatcgtatttatgatgacttttccagaagatattaagcctatcatcaaagcattaaataattcgtcgtatcagaaaactgttttaacaacaccaaaacaagcgccttatttatctgaacttagcgacgatgttgatgtgatagaaatgactaatcgaacattggtaaaacaaattaaggctttgaaaagcgcgcagatgattattatcgataattattacctattactaggtggatataataagacttctaatcaacacattgttcaaacgtggcatgcaagtggtgcattaaaaaactttggattaacagatcatcaagtcgatgtgtctgacaaggcaatggttcagcagtaccgtaaagtttatcaagcgacggatttttacttagtgggttgtgaacaaatgtcacaatgttttaaacagtctttaggtgcaacagaagagcaaatgctgtattttgggcttccgagaattaataaatattacacagctgatagagcaacggttaaggcagagttaaaggataaatatggaattacaaataagttggtattatatgtaccaacatatagagaagataaagcagataatagggctattgataaagcttattttgaaaaatgtttaccaggatatacactgattaataaattacatccatcaattgaagattcagacattgatgacgtatcttcaatcgacacgtctacattaatgctaatgtcagatataattattagcgactatagttcgctgccaatagaagctagcttgttagatattccaactatattttatgtgtatgatgaaggaacatatgataaagtgagaggcctgaatcaattttacaaagcaataccggatagctacaaagtgtatactgaagaagatttaataatgacgatacaagaaaaagaacatctattaagtccgttatttaaagattggcataagtataatactgataaaagtttacatcagctcacagaatatatagataagatggtgacaaaatgaggcttacgataatcatacctacatgtaataatgaggcaacaattcgacaattgttaatatctattgagagtaaagaacactatagaatcctttgtattgatggtggttctactgatcaaacaattcctatgattgaacggttacaaagagaactcaagcatatttcattaatacaattacaaaatgcttcgatagctacgtgtattaataaaggtttgatggatatcaaaatgacagatccacatgatagtgacgcatttatggtcataaatccaacatcaatcgtattgccaggtaaattagataggttaactgcagctttcaaaaataatgataatattgatatggtaatagggcagcgagcttacaattaccatggtgaatggaaattgaaaagtgctgatgagtttattaaagataatcgaatcgttacattaacggaacaaccagatttgttatcaatgatgtcttttgacggaaagttattcagtgctaaatttgctgaattacagtgtgacgaaactttagctaacacatacaatcacgcaatacttgtcaaggcgatgcaaaaagctacggatatacatttagtttcacagatgattgtcggagataacgatatagatacacatgctacaagtaacgatgaagattttaatagatatatcatagaaattatgaaaataagacaacgagtcatggaaatgttactattacctgaacaaaggctattatatagtgatatggttgatcgtattttattcaataattcattaaaatattatatgaatgaacacccagcagtaacgcacacgacaattcaactcgtaaaagactatattatgtctatgcagcattctgattatgtatcgcaaaacatgtttgacattataaatacagttgaatttattggtgagaattgggatagagaaatatacgaattgtggcgacaaacattaattcaagtgggcattaataggccgacttataaaaaattcttgatacaacttaaagggagaaagtttgcacatcgaacaaaatcaatgttaaaacgataacgtgtatattgatgaccataaactgcaatcctatgatgtgacaatatgaggaggataacttaatgaaacgtgtaataacatatggcacatatgacttacttcactatggtcatatcgaattgcttcgtcgtgcaagagagatgggcgattatttaatagtagcattatcaacagatgaatttaatcaaattaaacataaaaaatcttattatgattatgaacaacgaaaaatgatgcttgaatcaatacgctatgtcgatttagtcattccagaaaagggctggggacaaaaagaagacgatgtcgaaaaatttgatgtagatgtttttgttatgggacatgactgggaaggtgaattcgacttcttaaaggataaatgtgaagtcatttatttaaaacgtacagaaggcatttcgacgactaaaatcaaacaagaattatatggtaaagatgctaaataaattatatagaactatcgatactaaacgataaattaacttaggttattataaaataaatataaaacggacaagtttcgcagctttataatgtgcaacttgtccgtttttagtatgttttattttctttttctaaataaacgattgattatcatatgaacaataagtgctaatccagcgacaaggcatgcaccaccaatgatagtgaataatggatgttcttcccacatacttttagcaacagtatttgccttttgaataattggctgatgaacttctacagttggaggtccataatctttattaataaattctcttggatagtccgcgtgtactttaccatcttcgactacaagtttataatcttttttactaaaatcacttggtaaaacatcgtaaagatcattttcaacataatatttcttaccatttatcctttgctcacctttagacaatatttttacatatttatactgatcaaatgagcgttccattaatgcattccccatcatattacgttgcttctcgccaccaaggtttttatagtctcctgcacccatgataacttgattaattctaaatttacctcgtttggtagtaatcgtatggttgtaatttgctgtatcacttgatccagtttttaaaccatctgtaccaggcaaactcatttttgcaccttccaatgaaaagttgaatgtgtaatacgtaactgcatgcgttgttggtgctaactgctttgtaaagtctaatattttaggtgtctctttaatcacgtgtaaatctaaaatggcatagtctctagcagtcgttacagtacgttcttggtctttatactttgttggtgcaaatgaacgtaatcttgaattttcagcacccgttggattgacgaaatgtgtatttttcattccgatagctttagctttgttattcattaaatcaacgaaatcgctggtgttttttgataccttcttagctaaaattaatgccgcggcattactagaattagatactgtaatttgtaataggtctgcgattgtccatacttgtccaggatatagtttcgtattactcaactcaggtagtgtagacataatatattctttgttcgtcattgtgactgtgtcatcaagtgaaagctgccccttatttacagcttccaatgttaagtacattgtcattaatttagtcatagacgctggattccacttagtatcgatattgtattgatacagtaattgtccagtttgacttacattaacagcactcgtcggttcgtatgcagccgacaaacctgcataaccatattgatttgctgcttgtacaggggttacgtcactgttagtagcttgtgcatatggtgtcataatacttaatgttaaacataaaatgatgataatagatattaaatttttcataaagcgttaatcttcccttttccaattcttaaatattccctaaaagcaatggttattcctacttacggaaatcattgctaattcacttcaccttaattaaattgttgaaaataaagttttctgcagttaatttgaaaaataatgcaaatatattacgtgtgtagctaaaggtgttataatgtttgtacgaagagcaaacttactcaaaagcgattaattttcatgttttaatataaagactttgagaagttattacaaaaaatgcaatagaaatattctatcatataaatgttatgagcggtattttggggcaacactttatttgatttttaaagttttgttgggagaaagtatatgatagaaatgcatgtatctatctaaatgaattaactataaatttcaaacagaagaggtaaaactatgaaacgagaaaatccattgtttttcttatttaaaaaactatcatggccagtgggtcttatcgttgcagctatcactatttcatcactagggagcttaagtggactattagtgccactgtttactggacgaattgtagataaattttccgtgagccatatcaattggaatctaatcgcattatttggtggtatctttgtcatcaatgctttattaagcggattaggtttatatttattaagtaaaattggtgaaaagattatttatgcgatacgctcagttttatgggagcatatcatacaattaaaaatgccattctttgacaaaaatgaaagtggtcaattaatgagtcgattaactgacgatacgaaagtgataaatgaatttatttcacaaaagctacctaacttattaccatcaatcgttacattagttgggtcactaatcatgttatttattttagattggaaaatgacattattaacatttataacgataccgatattcgttttaattatgattcctctaggtcgtattatgcaaaagatatcgacaagtacacaatctgaaattgcaaacttcagtggtttgttagggcgtgtcctaactgaaatgcgtcttgttaaaatatcaaatacagagcgtcttgaattagataatgcacataaaaatttgaatgaaatatataaattaggtttaaaacaggctaaaattgcggcagttgtacaaccaatttcaggtatagttatgttgctaacaattgcaattattttaggttttggtgcattagaaattgcgactggtgcaatcactgcaggtacattaattgcaatgatattttatgttattcagttatctatgcctttaatcaatctttccacgttagttacagattataaaaaggcagtcggtgcaagtagtagaatatacgaaatcatgcaagaacctattgaaccgacagaagctcttgaagattctgaaaatgtattaattgatgacggtgtattgtcatttgaacatgtagactttaaatatgatgtgaagaaaatattagatgatgtgtcgttccaaatcccacaaggtcaagtgagtgcttttgtaggtccttctgggtctggtaaaagtacgatatttaatctgatagaacgtatgtatgaaattgagtcaggtgatattaaatatggccttgaaagtgtctatgatatcccgttatctaagtggcgacgcaaaattggatatgttatgcaatcaaattcgatgatgagtggaacaattagagacaatattttatacggaattaatcgtcatgtttcagatgaagaacttattaattatgctaaattagcgaactgtcatgattttatcatgcaatttgatgaaggatatgacacgcttgtaggtgaacgaggattgaaactgtctggcggacaacgtcaacgtattgatattgctagaagttttgttaaaaatcctgatattttgttacttgatgaagcaacagctaatctcgatagtgaaagtgaattgaaaattcaagaagctttagaaacattgatggaaggtagaacaacgattgtcattgcgcatcgtttgtctacaattaaaaaagccggtcaaattatattcttagacaaaggacaggtaacaggtaaaggtacgcattcagaactgatggcatcacatgcgaagtataaaaactttgtagtgtctcaaaaattaacagattaattttatatataagtaagcttggagcaaatacacatataccatcgaggaaattaaagtgtggcacattgatggatatagatgttaataaattgcttcaagcttttgtctattttaaatcatttgagaagttacgacataataattcttaaattaataaaatcgatattttaagaaaaaaatgctcatggtataatacaagttataagcaaacatacatatattaaatactgtagccacgagtcataattcttcatattttacatagcaatttaactgattttagagtccacggtacagaagtttgatatttcaatgtttctaaatttttaaaaaattaaatcataggtgggtgctaaatgtttttattaatcaacattattggtctaattgtatttcttggtattgcggtattattttcaagagatcgcaaaaatatccaatggcaatcaattgggatcttagttgttttaaacctgtttttagcatggttctttatttattttgattggggtcaaaaagcagtaagaggagcagccaatggtatcgcttgggtagttcagtcagcgcatgctggtacaggttttgcatttgcaagtttgacaaatgttaaaatgatggatatggctgttgcagccttattcccaatattattaatagtgccattatttgatatcttaatgtactttaatattttaccgaaaattattggaggtattggttggttactagctaaagtaacaagacaacctaaattcgagtcattctttgggatagaaatgatgttcttaggaaatactgaagcattagccgtatcaagtgagcaactaaaacgtatgaatgaaatgcgtgtattaacaatcgcaatgatgtcaatgagctctgtatccggagctattgtaggtgcgtatgtacaaatggtaccaggagaactggtactaacggcaattccactaaatatcgttaacgcgattattgtgtcatgcttgttgaatccagtaagtgttgaagagaaagaagatattatttacagtcttaaaaacaatgaagttgaacgtcaaccattcttctcattccttggagattctgtattagcagcaggtaaattagtattaatcatcatcgcatttgttattagttttgtagcgttagctgatctatttgatcgttttatcaatttgattacaggattgatagcaggatggataggcataaaaggtagtttcggtttaaaccaaattttaggtgtgtttatgtatccatttgcgctattactcggtttaccttatgatgaagcgtggttggtagcacaacaaatggctaagaaaattgttacaaatgaatttgttgttatgggtgaaatttctaaagatattgcatcttatacaccacaccatcgtgcggttattacaacattcttaatttcatttgcaaacttctcaacgattggtatgattatcggtacattgaaaggcattgttgataaaaagacatcagactttgtatctaaatatgtacctatgatgctattatcaggtatcctagtttcattattaacagcagctttcgttggtttatttgcatggtaatatgtcgaagagtgactatgataatacattttaactaataaatatgtccaggcatgtcgtctattgatataggtgagatgcttggacttttttattattgatataaaggtatttaaatatttttaaagttaccgaaattgaagcattataaaaaccaagtgcacatggtaatgcacttggcttttatgggaaatgaatattattgtacatatgacagtaaggactaggtacagtcatagtacttcgagcaaaatttgttttgttattataaacaacacaaaggagataacttctctattgaagaagttaaaaacattatagcagacaatgaaatgaaagtaaattaaaaattcagaatatttttaattattatattgtgagtgatatttattagggaaagctattcttcatataaattagttaaatagtaaatctttgttagaactctttccatagagttgtgacagcatttttgttgtgctactatttttatagtctaataaatatataaaggggatggtttcgtgaataaaacggttaaagatttaatactagttgtcttaggttcatttatctttgctgcaggtgtaaatgcatttattatttctggtaacttaggtgaaggcggggttacaggtttagcaattattttatattatgcgtttcatatttcaccagccatcactaacttcttggtcaacgcagtattgattgccataggttataaatttttgagtaagagaagtatgtacttaactattcttgtaacaattcttatttcaatatttttgagtttaacagaatcatggcaagtagaaactggaaacagcattgtgaatgccatttttggtggtgtaagcgttggactaggaatcggagtaattatccttgcaggcggtacaacagcaggtacaacaattttggcgagaattgcaacgaaatacctcgatgtaagcacgccatatgctttgcttttcttcgatatgatcgttgttgcaatttcacttacagttattccacttgataaagtattagtaacagtaatatcactttatataggaacaaaagtgatggaatatgtcatagaaggtttaaacactaaaaaagctatgacgattatttcaactaatcccgacaaacttgccaaagcaatagacgagcaaattggaagaggtttaaccattttaaacggacatggctattatacgcgtgaagaaaaagatgtcttatacgttgttatttctaaaacacaagtttcaaaagcaaagcgattaattaaacaaatcgataaagatgcattcctcgtaattcatgatgtaagagatgtctatggtaatggctttcttgcagatgaataaataaatggtatgagcacacatacttaaatagaagtccacggacaagtttttgaactatgaagacttatctgtgggcgttttttattttataaaagtaatatacaagacatgacaaatcgagctatccaatttaaaaagtaatgttagtcaataagattgaaaaatgttataatgatgttcatgataatcattatcaattgggatgcctttgaaaattgataatttaaaaatagaaattattttttataaacagaaagaattttattgaaagtagggaaattatgaatcgtttgcatggacaacaagttaaaattggttacggggataacacgattataaataaattagatgttgaaataccagatggcaaagtgacgtcaatcattggtcctaacggctgcgggaaatctactttgctaaaggcattgtcacgtttattggcagttaaagaaggcgaagtatttttagatggtgaaaatattcatacacaatctacgaaagagattgcaaaaaaaatagccattttacctcaatcacctgaagtagcagatggcttaactgttggggaattagtttcatatggtcgttttccacatcaaaaaggatttggtagattaactgctgaggataagaaagaaattgattgggcaatggaagttacaggaactgatacattccgacaccgttcaatcaatgatttaagtggtggtcaaagacaacgtgtttggattgcaatggcattagcacaaagaactgatattatctttttagacgaaccaacaacatatttagatatctgtcatcaattagaaatactagaattagttcagaagctaaatcaggaacaaggttgtacaattgtcatggttcttcatgatatcaaccaagcgattcgtttctcagatcatcttattgcgatgaaagaaggggatatcatcgctacaggttcaacagaagacgtattaacacaggaaatattagaaaaagtttttaatattgatgttgttttaagtaaagatcctaaaactggaaaacctttactggtaacttatgacttatgtcgcagagcttattcttaattaagtaagttaatatgataaaaaggacaattaacatgacaaatagagagaacccaacgccattgaagtttttatcctatattataggtttaagtatgatactactaatcacactatttatttctacattaataggtgacgccaaaattcaagcctctacaattatagaggctatttttaattataatcctagcaatcaacagcaaaacatcatcaatgagattaggattcccagaaatatagcagcagtaattgtaggtatggcgcttgcagtttctggtgcgattatacaaggtgttactcgtaatggtcttgctgatccggcgctcataggtttaaattcaggtgcttcatttgctttagcattaacatatgcagttttaccaaacacttcatttttaatattgatgtttgctggatttttaggtgctattctaggaggtgctattgtattaatgataggccgatctagacgtgatggatttaatccgatgcgtattattttagcgggtgcagcagtaagtgctatgttaacagcgctaagtcaaggtattgcattagcttttagactaaatcaaacagtaacattttggactgctggaggcgtttcaggcacaacatggtcacaccttaagtgggcaattccattaattggtattgcgttattcattatattaacaattagtaaacaacttaccattttaaatcttggtgaatcattagctaaaggtttaggtcaaaatgtaacaatgatcagaggcatatgtttaattattgctatgattctagcaggtattgcagttgctatcgctggacaagttgcatttgtaggtttgatggtacctcatatagcaagatttttaattggaactgattatgctaaaattctaccattaacagccttgttaggtgggatactcgtgcttgttgccgatgtgatagcacgatatttaggagaagcgcctgttggtgcaatcatttcatttatcggtgttccttactttttatatttagttaaaaaaggaggacgctcaatatgattagttcaaataataaacgcagacaattgatagcactggctgtttttagcattctactatttctaggttgtacttggagtattacctcaggtgaatacaacatacctgttgaaagatttttcaaaactttaattggacaaggtgatgccattgatgagttaatcttattagatttcaggttacctcggatgatgattactattttggctggcgcagcgcttagtattagtggtgcaatagtgcaaagtgtcacaaaaaatccaatagctgaaccaggtatattaggtattaacgcaggtggcggatttgcaatcgcattatttattgcaattggtaaaattaatgctgacaactttgtttatgtactgccgttaataagtatactaggtggtatcaccactgcattgattatttttattttcagttttaataaaaatgaaggtgttacacctgcgagtatggtattaataggtgtaggtttacaaacagcattatatggtggctcaattacaattatgtcaaaatttgatgataagcaatctgatttcatcgctgcttggtttgcaggtaatatttggggtgacgaatggccatttgtcattgcatttttaccgtgggtgttgattattattccttacttactatttaaatcgaatacactaaatattattcatacgggtgataatattgcacgaggtctaggtgtaaggttaagcagagaacgtttaatattattctttatcgcagtgatgttatcatctgctgctgtagcagtagcaggttcaatttcgtttatcggattaatgggtccgcatattgccaaacgtatcgttggaccacgtcaccagttgtttttaccaattgccattttagtaggggcatgtttacttgttatagctgatacaattggcaaaattgtattacaaccaggtggggttccagcaggtattgtcgtagcaattattggtgcaccgtatttcttatatttaatgtacaaaacgaaaaatgtatagtgtcaaaggacacaacttattgctatgaaaggcactttattataaggcttttcatagcattttttatttaatgagccactcaagactatttattttttcaataatgaaccattaagttatcaagaggatcttatcaaaaatatatttgataacggtatcaggttaattctttatgatagcgcattcatttattctgttttatactatgactgataataccaaggaggtacaacatgatgaaaaagttaatcaataaaaaagaaacatttttaactgatatgcttgaaggattgttaattgcgcacccagagttagatctgattgctaatacagttattgtaaaaaaagctaagaaagaacatggtgtagcaatagtctctggaggtggaagcggacatgaacctgcgcatgccggttttgttgcagaaggtatgctagatgcagcggtttgtggcgaagtatttacatcacctacacctgataaaatattagaagctattaaagcagtagatactggtgatggtgtattactagttgtaaaaaactatgcaggtgacgtgatgaatttcgaaatggcacaagagcttgcagaaatggaaggtataaatgttcaaactgttattgttcgtgacgacattgctgtgacaaacgaagtacaacgtcgtggtgttgcaggaacagtgtttgttcataagcttgccggttatcttgctgaaaaaggttattcattaacagagataaaatcgcgtgtagaagcgttgttacctgaaattaaaagtattggtatggcaattgagccaccgcttgttccaactactggaaaatatggctttgatattgaagacgacaaaatggaaatcggtattggtatacatggtgaaaaaggtattcatagggaagaagtaaaggatattgatcatattgttggaacattgttagacgaattgtataaagaagttactgccaatgatgtcatattaatggtaaatggtatgggtggtacgccgttatctgaattaaatatcgtaactaaatatattcaacaaaatttagctgcaagaacggttaatgttgctaaatggtttgttggtgattatatgacatctttagacatgcaaggtttttctataactatcgtgcctaataaaccagaatatttggaagcatttttagcaccaacaacaagtcaatactttaaataagaagtgaatatgaataaatatacatttatgaggtggcacaaatgaaagtgaatgatatgaaagcacgtttattaaatttagaagaaacgtttaaaaaacatgaatctgaattaactgaattagatcgagcaattggtgatggtgaccacggggttaacatggttcgtgggtttagtagtcttaaagacaaacttgatgatagctcaatgcaatcattgttcaaatcgactggtatggcattgatgtcaaatgttgggggtgcatcaggaccactgtatggctttagctttgttaaaatgtctgcagtcaccaaagatgatatggataatcaagatttcattacactaattcaggcatttgccgaagcggttgaatcacgtggtaaagttactttaaatgaaaagacaatgtatgatgtagtagcgcgagcagcagagaagcttgaaaatggtgaaactttaacattcaatgatttacagcaattagcagataatacaaaagatatggtagcaacgaaaggtagagctgcatattttggagaagaatcaaaaggttatattgatccaggtgctcaaagtatggtttatattttaaacgctttgattggagatgaagataatgcctaaaattatacttgttagccacagtaaagaaattgcaagtggtacaaaatctttgttaaagcaaatggcaggtgacgttgatattataccaatcgggggattaccagatggttcaattggaacttcatttgatatcatccaagaagttttgactaaattagaggatgatgcattgtgtttttacgatattggatcttcagaaatgaatgtagatatggcaattgaaatgtatgatggtaatcatcgtgtgttaaaagttgatgcaccaattgttgaaggcagttttatcgcagcagtaaagctatcaatcggcggttcaattgatgatgcattagcagaaatcaaacaatcattttagttaaaatttactaataatgaaaaatgtaaacctttttcaaatgaaactttataaaaaatatgatagtatatatgtaaatgtttaataaaatctggagaaataggaggacattgccatgcaacaccttataaaaaaacatgtattgaatggcgagtttgatttagtacgacaattgatgtccgaaacagattttatggaatttgaagaagcatatatttcaagtgcgcatgaagtagaaagtatgatgttttatacatgtattttagatatgattaagtacgaagaatcatctgaaatgcatgacttagcatttttattgcttgtgtatccactaagtgaatatgaaggtgctttggattctgcttattatcatgcagacgcttccataaaacttactgacggcaaagaagttaaaagtttgttacaaatgttattattgcatgcgataccaacacctgttatttcagataagaaggcttttgatatcgccaagcaaattttaaaattagatcctaataataatgttgctcgtaacgtcttaaaagacactgccaaacgtatggacaacgttgttgttgatataaatgaattacaccaacgtaatgcacgttaattacatttcaattatattagcttaataatagttttaacatttggttgggttgggacatatgttccagccttttttaatacttaaaaactaacgaagtatacttgtgtgcacaaatggtttttatacaacattttataaatttatacattttaataaagaacatacgatatatggtttaaaccttgttaactgagagattttgatatgtattcttcgaaatttaactaaatttacgaaattcaagaagcacaataattaatcaattttcctatacaaaagttcgtatgactgcattataaaagcataaatttataatttttttaaatgtcattgaacgtgataatgtgaatggattgagcaattttgaaaaagtgaaaaataacctatgcgacttgcaattaattttcagtacgttataatgcacactgtgcaaaattaaggaggtctattattcacatgatgatgaataaagaagcaacaaaaattggatttgcctacgtcggcattgtagtgggcgcaggattttcaactggacaagaagttatgcaatttttcactaaatatggcttgtgggcttatttaggtgttattatatctggttttattttagcttttattgggcgccaagtagcaaaaattggtactgcctttgaagcgacaaaccatgaatcaacattacaatacgtattcggtgaaaagtttagtaaagtctttgattatattttaatcttcttcttatttggtatagctgtaaccatgatagctggtgcaggcgcaacatttgaagaaagttataacatacctacatggctaggtgctttaattatgacattagcgatttatattacgttgctattagactttaataaaatagtacgtgcacttggtatcgttacaccatttttaattgttttagttgtattaatcgctggcgtttatttatttaaaggtcatgtttcattagcagaagttaaccaagtagtgcctgaagcaagtatttggaagggaatctggtttggtacaatatatggtggattagctttttctgtaggttttagtaccatcgtagcaatcggtggggatacagaaaagcgtacagtgtcaggtgcaggcgcgatgtatggtggtattatctatactgtattactagcattgatcaactttgcattgcaaagtgaatatccaactattaaaaatgcctcaattccaacattgacgttagcaaataatatccatcctttaatagcaacagtgttatctgttattatgctggcggttatgtataatactattctaggactaatgtattcatttgcagcacgttttacagaaccatacagtaaaaattatcatatctttattattataatgatggtagcaggttatttattaagtttcgtaggatttgctgaattaattaataagttatatacaattatgggatatgtaggcttatttattgtagtagctgtaattattaaatatttcaaacgtaaaaatgcggataaaaaacatattgcttaatatcatatgatggatatccgaaactttacaattgaatcactttgttttaaccttaaaagcaattcgtctctactcttatcgggcgaattgctttttatatttattcagtctattaatatgagcgtctaacaaatagagaggtacgatgtaatgaataaagataataaatggacgatgataactgcgctttttataactgtaatcagtgtattgttagcatttcatctgaaacaacattatgaccaaattacaaatgagaaccatgctaataaagacaaaattaatattaaaaataaaaatgtgcgcatttatcaaaaccttacatacaatagagttttccctaacagtaaattagatattattacacctgttgatatgtcttctaatgccaaactgccagttattttttggatgcacggtggtggttatattgcgggtgataagcagtataaaaacccattattagcgaaaattgctgaacaagggtacattgttgtgaatgtaaattatgcattggcgccacaatataaatatcccacaccattaattcaaatgaatcaagcaactcaattcattaaagaaaataaaatgaatttacctattgattttaatcaagtaattattggcggtgattctgcaggtgctcaattagctagccaatttacggcaatacagacgaatgatcgcttaagagaagccatgaaatttgatcagtcattcaaaccatcgcaaattaaaggtgctatactatttggtggtttttataatatgcaaacagttagagaaactgagtttccaagaatacagttatttatgaaaagttatactggcgaagaagattgggaaaagagctttaaaaatatttcacaaatgtcgacagtaaaacaatcgacaaaaaattatccaccaacatttttatctgttggagatagcgatccattcgaaagtcaaaatatagaattcagtaagaaattacaagaattgaatgtaccagtagatactttgttttatgatggtacgcatcatttacatcatcagtatcaatttcaccttaataaacctgaatcgatagataacatcaaaaaagtgttacttttcttaagtcgtaatacatcttctagtggtattcaaactgaagagaaaccacaaatggaaaatccgagtaatgaattaccgttaaatcctttaaactaatgataaacagtagtaatttattacttaagcaacatttaagatcttcaaattgaaaacgaagaatttaaaacatgtggggctaatgtgtaagagtctgagatataataaattgttagcggttctttatcatttctatctcaccctattatgatgtgacatttattttacaaactaatttgttttgaacctgaaaataactttttacaactaaattgtcgaaaaacagtgtgtacatgatataataaatttataaattgaaaagaattcaaaagaaaaaataaaatatagattgagcacgaagtgatttgaaataaggttgtgaaagggaatgacaaggtcagcattaaaaccatttaaaaataaacgcgttatggttactggacgtatacaacgtgttttgtttaaaaattatttagatagacatagcacatttaagccgaatgtaaggatattattaaaagatgtatttgtttcaggtgtatcaatagatcatttatggttatatgagacaaataaatactatgcattggcaatggaacttattcatcaacgagtaaaatttagtgcgaatgttgtaccatattacaaaataaatagaaataataatttattcgtacaagattatggaattaagcgtaaaggtaggttaattactgaagaagcttacaatcaaaacaatcagtatcaggataagatatatgaaaaattaccggatatagattttagactcgaagatttttatagtaaggaaaactaaacaacatatataaagcactactaatcgtagttgatagttgatcaattacacattagtggtgctttattttgaatttaaatttgataaatgaataagagtatacgcattcatttaagattagatgacattgataagtatgagtaatgtattaggtaaccattaaattcgttgttatgcgattctgatacaagattatgataaaatagctttaattaagaattttagccatcatatagtcatcgtaatatttaccatcgataaataacttatcttttaaaacgccttcgatttgaaaatcggcacttttaaaaagctcgagggcaggttggttattgagtggtacatttgcttcaattcggtgtatttgattgtttaaacaccaagccataatggcatcaagaagtgcttggccaattccacgatgttgatataatttctttacacctaaatcaattttagcaacatgtttaatgcgttgaaatggtgtcgtattaacaaaggcaaagccaacgagttgttcatcactttcagcaacaaagatgactttatgtggagaagtgatatattcttctaattgtttactagccgacgtgacgctaggatcatattctcctggtgtgtagaacatatacggagattcgtcgtatattttcgctaacattgaaatgaaattttctacatctttgatactaactctacgtataatatgggccataaaaagcctccagtattttgaaattttaaaacatttgctactattataatatatatgtaactaaaaggtggagtaatatgttttttggttacagtttaaaggagtattttagatgaaacctaaagttttattagcaggtggaacaggatatattggtaagtatttaagtgaagtgattgaaaatgatgctgaactttttactatatcaaaatatccagacaataaaaaaacagatgatgttgaaatgacttggattcagtgtgatatatttcattacgaacaggttgttgcagcaatgaatcaaatagatattgctgtattctttatcgacccaacaaagaattctgccaaaataacacaatcatcagcaagagatttaacattaatcgcagcagataattttggtcgagcagcggctatcaatcaagtaaaaaaagtaatctacatacctgggagtcgttatgataatgaaacaattgaacgcctaggtgcatatggcacacctgtagaaacaacaaatttagtttttaaacgttctttagttaatgtagaattacaagtttcaaagtatgatgatgttagatcaacgatgaaggtagttttaccaaagggatggacattaaagaacgttgtaaaccattttattgcatggatgggttacactaaaggaacttttgtgaaaacagaaaaatcacatgatcaatttaagatatatattaagaataaggtgcgaccgctcgcagtatttaaaatagaagaaacagctgacggaataataactttaattttattgagtggaagtttagtgaaaaaatacacagttaatcaaggggagttagaatttagattaatcaaagagtcggcagtcgtttatatacatctatacgattatatccctcgattattttggccgatttattactttatacaagcaccaatgcaaaaaatgatgattcatggctttgaagttgactgccggattaaagattttcaaagtcgattaaaatcaggagaaaatatgaaatatactaaatgatattgggtgatatggatgcaaatactactagtagaagatgacaatactttgtttcaagaattgaaaaaagaattagaacaatgggattttaatgttgctggtattgaagatttcggcaaagtaatggatacatttgaaagttttaatcctgaaattgttatattggatgttcaattacctaaatatgatgggttttattggtgcagaaaaatgagagaagtttccaacgtaccaatattatttttatcatctcgtgataatccaatggatcaagtgatgagtatggaacttggcgcagatgattatatgcaaaaacctttctataccaatgtattaattgctaaattacaagcgatttatcgtcgtgtctatgagtttacagctgaagaaaaacgtacattgacttggcaagatgctgtcgttgatctatcaaaagatagtatacaaaaaggtgacgatacgatttttctatccaaaacagaaatgattatattagaaattcttattaccaaaaaaaatcaaatcgtttcgagagatacaattatcactgcattatgggatgatgaagcatttgttagtgataatacgttaacagtaaatgtgaatcgtttacgaaaaaaattatctgaaattagtatggatagtgcaatcgaaacaaaagtaggaaaaggatatatggctcatgaataatttgaaatgggtagcttattttttgaaatctcgcatgaactggatattttggatattgtttttaaacttgcttatgttaggcattagtctaatcgattatgattttccaatagacagtttattttatattgtttctttgaatttaagtttaacaatgatttttcttatattgacatattttaaagaagtaaaattatataagcattttgacaaagataaagaaatagaagaaattaaacataaagatttagcggaaacgccatttcaacgtcatacagttgattatttatatcgtcaaatctcagcgcacaaagaaaaggttgttgagcaacagttacaattgaacatgcatgaacaaaccattacagaatttgtgcacgacataaaaacacctgtgacagccatgaaattattaattgatcaagaaaaaaatcaagaaagaaaacaggcattactatatgaatggtctcgtataaactcgatgctggatacacagctgtatattactagattagaatctcaacgcaaagatatgtattttgattacgtgtcacttaaacgcatggtcattgatgaaatacaattaacaagacatattagtcaggttaaaggtattggttttgatgttgactttaaagtggatgattatgtttatacagatacaaaatggtgtcgtatgattattagacagattttgtcaaacgcattgaaatatagtgagaattttaatattgaaattgggacagaattaaatgatcaacatgtttcgttatatattaaagactatggcagaggtattagtaaaaaagatatgccgcgaatatttgaacgaggatttacgtcaacggctaacagaaatgaaacgacgtcttcaggtatgggtctatatttagtaaatagtgtaaaggatcaattaggtattcacctgcaagtcacgtcgactgttggtaaggggacaactgtcagattgattttcccattacaaaatgaaattgttgaacgcatgtcggaagtgacaaatttgtcattttaaacatgcgttttgttacttagaattgatacatcaatgcagcttcaacgttataataagatagatgttagtcatatgttaaattgaagatacaagtgccaaagcctaaaggaaatgaagttaagataaattataggagtgttaaagtggcaattttagaagtaaaacaattaacaaaaatatatggaactaaaaaaatggcacaagaagtgttgcgagatatcaatatgtctattgaagaaggcgagtttattgctattatgggtccctctggatctgggaaaacgacattattaaatgttttaagttcaattgattatatttcacaaggttctattacattaaaaggaaaaaaattagaaaagctttcaaacaaggaattatctgatatacgcaagcatgatattggttttatttttcaagagtataatttactgcatacattgactgttaaagaaaacataatgttaccactaacggttcagaagttagataaagaacatatgttaaatcgttatgaaaaagtagcagaagcattaaatatattggatattagtgataaatacccttctgaattgtctggtggacaaagacaacgaacatctgctgcaagagcgtttattacattaccttctattatatttgctgacgaaccaacaggtgcactggattctaaaagtactcaagatttattaaaacgattaacaagaatgaatgaagcatttaagtctacaattattatggtaacgcatgatcctgttgcagcaagttatgccaatcgagtagtgatgctaaaagatggtcaaattttcactgaattataccaaggggatgacgataaacatacctttttcaaagaaataatacgtgtacaaagtgttttaggtggcgttaattatgacctttaacgagataatatttaaaaatttccgtcaaaatttatcacattatgccatctatcttttttcattaattacgagtgtagtattgtattttagctttgtagcattaaaatacgcgcataaactaaacatgacagagtcatatccaattattaaggaaggctcacaagtcggaagctactttctatttttcatcataattgcatttttgttatatgccaatgtgttatttattaaacgacgaagttatgagcttgcattatatcaaacattaggtttatctaaattcaacattatttatatactaatgctcgaacaattactaatatttataattacggcaatattaggtattattattggtatttttggttcaaaactgttattaatgattgtctttacattattaggaattaaagaaaaggttccaattatttttagtttgagggcggtatttgaaacattaatgttaatcggtgtcgcttattttttaacctctgctcaaaattttatattagtgttcaaacaatctatttcacagatgtcaaagaataaccaggttaaagaaacaaatcataataaaattacatttgaagaggttgttttaggcatcttaggtatagtattgattaccacaggatactatctatctttgaacattgttcaatattatgattctatcggtatacttatgtttattttattgtcaactgtgattggggcatacttattttttaaaagctctgtttctctagtttttaaaatggtgaagaagtttagaaaaggtgttataagtgtaaatgatgtcatgttctcatcatctattatgtatcgtattaagaaaaatgctttttcacttacggtcatggcaatcatttcagcgattactgtttcagttctttgctttgctgctataagtagagcgtccttatcaagtgaaataaaatatactgcaccacacgacgttacaattaaagaccaacaaaaagctaatcaattagcaagtgaattaaacaatcaaaaaattcctcatttttataattataaagaagtaattcatacgaaattgtataaagataatttatttgatgtaaaagcgaaagaaccatacaatgtaacaattactagtgataaatatatccctaatactgatttgaaacgtggacaagctgatttgtttgtagcggaaggttctatcaaagatttagtgaaacataagaagcatggtaaggcaattataggaacgaaaaaacatcatgttaatattaagttacggaaagatattaataaaatctattttatgacagatgttgatttaggtggaccaacgtttgtcttaaatgacaaagactatcaagaaataagaaagtatacaaaagcaaagcatatcgtctctcaatttggattcgatttgaaacataaaaaagatgctttagcattagaaaaagtgaaaaataaagttgataaatctattaaaacaagaagtgaagcgataagctcaatatcaagtttaaccggaatattattatttgtaacatcatttttaggtattacattcttgattgctgtatgttgcattatatacattaagcaaatagatgaaaccgaagatgagttagagaattatagtatattgagaaagcttggatttacacaaaaagatatggcaaggggactaaagtttaaaattatgtttaattttgggttacctttagttattgcactatcacatgcatattttacatcattagcatatatgaaattaatgggtacaacgaatcaaataccggttttcatagtaatgggattatacatttgtatgtatgctgtttttgcagtgacggcttataatcattccaagcgaacaattagacattccatataaaatatacagatggctttcagtagagtagtggattcgaattcacgaactatactggaagctttttattataaatgaagagaagttatatttttagcatgtatagttgaatactgggttaaaataccatattaataatgaagtaaaggtatgagtgattatgaaagtgttttgaatgaaatatatttaattggtgatgcttttaattgaaaagattaacaggattcaactttgtaaattgtattaaatgtgagaaaataaaagtatattcattgagatatatgagtcaatgatcgttttaaacaagataagtgtattttaatatgtaaaagttatgtaataaatattgtatcgttgcaaatttcccaactatatccatttacaatttttagagttgtatagataaaaaattgcctataaaataactttttcaaaacaaatgcctactactatttaaattttatgtaaaagttaagtttcggaattgttaaaaatttgtaaattgaattgtgggattgtaaattttgtgctattttcatataagggcaaatacagtaaattgtttactgtgaggcatttttgaaattaatatcagtacactaaaattatactgacgattgataataacaaatttgtatcattagtttgtaaattcacttgtcttaatttgaaacaaattataactgaatgtgattggtgacaatcgcttaaatggaggattttaaatgtttagtaagaaaaaagataagtttatggttcaattagaagagatggttttcaatctggatcgtgctgctattgaattcggtaaaatggatttcaatacacatttagatttaaaagcatactcagacaacattaaaacttatgagtcacatggtgacgaattagtacatcaagtaattactgatttaaatcaaacatttatcacaccaattgaacgtgaagatattttatcattatgtgatgcaattgatgatgttttagatgcaattgaagaaacggcagctatgtttgaaatgtattcaatcgaatacacagatgaatatatggctgagtttgttgataacattcaaaaagcagttgcagaaatgaaacttgctgtcggcttattagtcgataaaaaattatcacatatgcgtattcattcaattaatattaaagaatttgaaacaaactgtgatggtattttaagacagtcaattaaacatattttcaatagcgaaacagatccaatcacattaattaaaataaaagatatttatgaaagcatggaagaaattgctgataaatgtcaaatcgtagcaaataattttgaaactattattatgaaaaatagctaaggggagtatatatttatgtcatatataatcatcgtcactatagctgtagttattttctcgctgatatttgactttatcaatggattccatgatacagccaatgcagtagctactgctgtatctactagagcgttaacgcctaaaacggcaattttaatggcagcagtgatgaactttataggtgctttaacatttacgggcgttgcaggcaccattactaaagacattgtcgatccatttaaattggaaaatggattagttgttgtgttagctgcaatacttgcggctattatttggaatttagctacttggttttacggaattccaagttcgtcttcacatgcacttataggttcaattgcgggtgcagcaatcgcatctgaaggctcatttggagtgttacattaccaaggtttcacaaaaattattattgtattaatcgtttcaccgataatcgcattttgtgttggtttcttgatgtattcaatttttaaagttatctttaaaaatgcaaatttaacaagagcgaatcgtaactttagatttttccaaattttcacggcagcgttacaatcattctctcacggtacgaatgatgcgcaaaaatcaatgggtattattacgttggcattgattgtcgctaatgtacagaatgatggcagtgttgaaccacagttatgggtaaaatttgcctgtgcgacagcaatggggcttggtactgcaattggtggctggaaaattatcaaaactgtaggtggtaatattatgaaaatacgtccagcaaatggtgctgcggccgatttatcatctgcattaacaatttttgttgcatcatcgctacatttcccattatcaacaactcacgttgtgtcatcatcaatcttaggtgttggtgcttctaaccgagctaaaggtgtaaaatggagcactgcgcaacgaatgatcattacatgggtgattacattacctatttcagcattgttagcaggtttactattctatatacttaacttatttttctaattgaaaataaaactaaactgaacttcagtatcacaaacatatggtggtattgaagttcatttttttatgtaagtagataacatattttatagaatttacgtagaatgaccaagacaaagcattttaattagggggctaagttataaatttattccatggaacataaacagttaggtcattaaaatataagtaagcgtaaaataatgatttaatagtttatattcttcaatgaaggaataattaaatagttatcaacttgtttaattaacctaaattgtattgggctttatttaatataaatttgtatatgtagaagaaaaagcgtaaaatactggtataacaaattaaatcattatatagtcaacttagttgcattattttgatttttaatatattatgcatttaatttaatcaaataggtaggttattattttttacctaactaccattcatacaaaatataaataagtatgatagggaagggtgagataattttttgtaccaaaatgaaaatttttttcaaaaataaaaaactagcaatctcacatgatgtgaattgctagtatatatcagtacaatttatttaattaatggatgaatgcatagctagaaacttctgaagctggaattgtacggtagttcatattgtatggaccatatgtgtaattcatttcagaaatcaagatactaccatcaccattgacacgttcaacataagcaacatgaccatatggaccaggtgtgctttgcataattgaaccaactgatggtgtgttgtttacttggtaaccatcattagctgcgttaccagcccaatacttagcgtctgaccaatatgtgctaattggactaccagcttgagcacgacggtcaaatacgtaccatgtacattgaccagcagtgtataaattttggtgattaaaagatgatgcattgccattgctacctgttgtagctgttggtgttgtaccacctgatccaccattaggaatttgtaatgtttggttaggcataattaaataaccacgtaagttattggctgccattaattgatcaactgaaacaccatatctgctagcaatgatatttaatgattcaccagcttgtacagtatgagatgatgctgaaccagcttgtggagaagtgtttgacgtattttgtgcatcacttccacctactgagataacttgaccagggaataccaagttgttatctaattggttattttgtttaatactctctactgaagtgttgtatttttgagcaatactccataatgattcaccagattgtactgtatgttgtgtagaagcttgtgcatcatgatgcgttaaaaatgcagctgcaccagatgttgctgttattgcaaatgctaattttttcaaagggactcctccttaaaattaagttttactacttttaaaaattattaagacaatttatatagtaaattaagttttcgttttatattacgatttccatattatcaaaaataagtagctttgtgtggtttgttattatcttgtaatattattaacattttaggatatcggttcatatttttataaatgctgatttgatagtgtataaaagcgttttagtgattttaactaattataaaaaattatattttgtaacattgtaaaatgtaaaattactatacttgttaaaggttatttcttttgatgaagcaaaatttactgtaaaatttgacgcataaaacgacggtagaaggaggaattattttgtcgcaaaatacaaatcattcatattatcatcaaaaccagcatgctcaatcaataagtaaagtgtggctttattttatgtattattggattatatttggcataggatgctatctaggtcagtttttaccattaagttggcgacaacccttgtcatttggattactgattattattttagcaacacttgtttttgaaagagcgagacggttcggtttaattatttcacatatttacgctgtagtgattggcttattgtcatacgcaacgtttaccacgtatttacaaaatttaggaccagatattttctataaaaatatcgcattagcaatttttgcatttatagcatttggtattattggttatttcttcgttggagatgcatcgagtataggcaaatatttattcgttacattaataacattaattattgcgagtctaattggtatttttcttcaaaatcctattttttacactattattaccgtcgttagtctgttgttatttctactttatactttgtatgattttaatcgtttaaaaagaggtgactattcaccaagagaaatgggatttaatctatttattaatttgttgaatattattaaggatatactttaccttgctaatatgttcagaagataaacagttaaattaataaagaaatttgtataaagttttggaataatcaataatgaatatcaaccttaaattggagcgattgtcataaattagaaatttagatagagattttactgataaagcaataaaaatttattaccttaattgtaaagatattattaatcattaaaatgattaactgctatagttctaaagtaaacaaatcttagaagataaactttaaacaggtgtacttgcctttctaattacacttttattagaaaagtaaagtatagctacgtattaattttaaaatcgaaatattaataggaagaagtatagataatataaacaatttaatgttagtttgagctcatctcaaaagtagaatgtgatttaaataagtgtttatttttaaattgaaaatgaatatataactaacaaaagataatagtaatacgttgtagatgtggtcatttaaaattattttgaaaatactaaaaagtagtgtgttttcaattggatagtttaattaaactgactacatctatttttgtaatatttaaatgattgatatataagtttaaaaattaaccattatatagttttatttatttttgatttggtattcgtattgtgttaaatttacgtttaattaaataagttaaatattatagggaatgataaaagtggtacttaaatatagaaagaggtaaagttatggcaaaatcatgcttgcatatacttactaataatgaatatgcgacaacgcgttgccaagatggcatagtcttattttggccaattgacggggaaatcgaactacaaaaatttcgtaaaagtaaaataattgaagatgatatatatattattaatcatctggatgtatttagtattaagaataataaaaaaacgatcatgttgtatttgagtagcgattggtttgcggaattaggctttactttctttaattaccactatacagcaaagttgattaaatcatcctataatttgaaatgtctactattaaaattgacttatcgatatcttgataatcaacctctcaatgacgctgatattagaaaattacaggatattattaaaatcattgcaaaagaagcaagtatggataaaaagattgcgcaaaatcaatatcgatatgcctattatggtgatttacgtgacgagctcgaatatatttatcaaaatgtaaatcaacgattgacattaaaaagtgtcgctgataaattatttgtctcaaagtcaaatttgtcatcacaattccacttacttatgggcatgggttttaaaaaatatattgatactttgaaaattggtaaatcgattgaaattctacttactactgatagtactattagcaacataagtgagcatttaggttttagtagtagctccacttactctaaaatgtttaaaagttatatggatataacaccgaatgaatatcgtaatttatcaaaatataataaatgtttaatgctaaagccagaaccactagtaggcaaaatggtgcaagaagtaaaagaaatcatattgaattatattgaacattataaaaaccacctaactgatgttatacatattgatgaagacaaatttgaaacacctaaattgtttcaaacggttattcaaataaatacttatacagaaatgaaattagttttcttagaaggaatctttaaaaccttattgaataagaacagtcaagttgtctttttcatcatgccatcgattctaaaaagtaaaaataccatgtccgaagaagaaaaattcacaatcattaaaacaataattgaaagtgatctaaagatagcatttaatataaatgatattgaaacaacttattttgttgaagaagcttttatgagtgttttcagacaaatatctccaaacgaattaagtaatcataataattacgaagtgcattttgtttttgatttatcattgatggaaattagaacaatttatcgaatgatattaaaattacataacatcatgttgaatgtgaaattaggattgaacattacctgtttatttgaaaaaccttcagtttttaaatcactagtatcacaaataaagcgacttaaattcgattcgttaataatagataatgcaaatttaagtagcccttatttgatgggggaaagtgatgagttactattgaaaaatattttgcattttaaaaatttaaaacaagtaattaatgaattggatattgaacaagaaaagcttatttttctaaatgttgaaaatcataaactgcttaataataaagaacgagatttaagtaatagtgctccattaatttataagacattaagtgcgctgtatcacaactttgatggctttggattaaacatttttgataatcatcatacatttaatgcgatgcatctatatgataaaaatggatttaaaacaacactaggtcttatattggaaaaatttatcgaatatgtctcgaaaccaaaatacgaaaacagttattattctatttttgatatagagaattattattgcctggttatttatgattggcgagtgattgagagcgagacaattatgagcaattttgaggatagtcaagtttatataaatttcaaaaataatgttttaaacgataaatatctaattgtaatagaaacattggacgaaaatagtggcaacattaatcatttgatttctaaagaattaagagataaatatgaatggaaccctagtttactatctaaaattgacaactaccttaaaccagcaatcgagattaaagagcataattttagtgataattccttgaatattaacgttacttttaatgcgttatacataattaaaataggaaaaaaataacaccttgatatgtattgcaaaatttaatttgcatttgttggtaattttgacaacgtattaaaaacaaatgagaaagacaatggcaaaaaaatttaagataataatgacagaagcattgtctttatatatttgggggtgcaacattttgaatactgagaaattagaaacattgcttggcttctataaacaatataaagcattatctgaatatattgataaaaaatataagttgtcgctaaatgatttagcagtcttagatttaacgatgaagcattgcaaagatgaaaaagtacttatgcaatcatttttaaaaactgcaatggatgagctagatttaagtaggacaaaattattagtttctataagaagactaattgaaaaagaaagacttagtaaagttagatcatctaaagatgagcgtaaaatttatatttatttaaataatgatgatatatctaaatttaatgctttatttgaagatgtagaacaatttttaaatatttaattgaaattgagtgtcgaaagcatagaatttgcttatcggcacatttttaatttatacatattttaaaactaagtaacagtttgaaggaatcgtagttcaataatgttaattgtgaaaatgtatataaacataaaaaaatcatgtataatatatgttgttaattaaacagttcgaaagcgagatgacattatgggacgtaaatggaataacattaaagaaaaaaaggcccaaaaagataaaaacacaagtagaatatatgcgaaatttggtaaggagatttatgttgcagcaaaatctggtgaacccaatccagaatctaaccaagctttaaggttggtgcttgaacgcgctaagacatattcagtgccgaatcatattattgaaaaagcaatagataaagctaagggtgctggagacgaaaactttgatcacctaagatatgaaggatttggcccaagcggatcaatgctaattgttgatgcgttaacaaataatgtaaatcgtactgcctctgatgtgcgagctgcttttggtaaaaacggcggtaatatgggtgtatctggatcagttgcttatatgtttgatcatgtggcaacatttggtattgaaggaaagtctgttgacgaaatacttgaaacattaatggaacaagatgtagatgtaaatgatgtgattgacgataatggattgacaatagtctatgctgaaccagatcaatttgcagtcgttcaagatgcgcttcgtgcagcaggtgttgaagaatttaaagttgctgaatttgaaatgttacctcaaacagatattgaactttctgaagcggaccaagtaacatttgaaaaattaatcgatgcattagaagatttagaagatgtacaaaacgtattccataatgtggatttgaaataatgaaatcagcagaacaatggattgatgaattgcaacttgaatcacatcctgaaggtggtttctatagagagacaattcgagaagtattgaaagatggacgcagagcgccgtttagtagtatttattttttacttacagatgacaatatttcgcattttcatcgaattgatgctgatgaagtatggtactatcatgctggtgattctctaacaattcatatgataaatccggatggggaatatacgactgcaacattgggtactgatatccaaaatggagatgtattgcaatatgtagtgcctaaaggaacaatttttgcttcttcaatcgaaatttcaaatacttatagtttagtaggttgtatgtgtcaaccggcatttgagtttaagcagtttgaattgtttaagcaatctgaattaattacacaatatccgcatcttaaatcagtgattgaaaaatatgctttaaaataaaaatgatcaatgaagtggtttgaaggttgttaataaacctttgagtcacttcatttttatatgtattcttgattgaatcagaatagatttgatgcttcagctgtttttaatgaaaatagcattaaatgattttgaaaacgataagagtgtgttatttatatttttgaaaaatcacttttatgaagaaatgtgtgtactatctaattaatattgtctattttaagtaaattgaagcgagttgtagtaaaataataataaatattttcatatgattaacaaaaactataaaactgtatcatgacatgacatcatttatgtagttttatataataatgacaaggagttggtgactgtgaaagtaaagtatatagataaacgtcactggcgtcgcctaattgatagggaatacacagaggtaaaagttaataataataggtttaagggtattataggcttagtcacgatgaaaaaggttcgtgatcctttagaggtgacggtagttggacaaaatatcattgtcgcagatgacaattataaatggttgcaaatactacctgaaaagaaacgttatagtataactgtaatgtttgataataaaggcaatccattagaatattattttgatataaatatcaaaaatataacgcaaaaaggtaatgcgcgtacagtagatttatgtttagatgttttagcattaccaagtggtgaatatgagttggtagatgaagatgatttaatgtttgcattagaaagtgagcaaattacaaaaaagcaatttcatgaagcatatatgattgcacatcaaattatggcagagttagaaaatgattttaaaggattccaaaagaaaatcatgtactgctttaataaaattaatgcaaaggctcaaaaaaatcatcaaaagccacaaaataaaactaatattgaaaaaagcaaacaaataaaacctaagcaatataatcaaactaaaaatcaccaacaacaaaagaaaaactaagtaattcaagctgcagccatgccaataaaattggtgaaattattcgttagtaatgaactcatgaatgcttgtagccatgaaagttcaataattgaataatttatggggggaaattatgaagattgaagactatcgtttactaataacattagacgaaacgaaaacgttacgtaaagcggctgaaattttatatatatctcaacctgctgttacacaaagactaaaagctattgaaaatgcttttggagtagatatttttatcagaacaaaaaaacaattgattacaacaactgaaggaacaatgattattgagcatgcccgtgacatgttgaaaagagagcgattattttttgacaaaatgcaggcacatattggtgaagtgaatggaacaatatcaatcgggtgttcttctttgattggacaaaccttacttcctgaagttttgagcctatataatgcccaatttcctaatgttgaaatacaagtgcaagttggttcaactgaacaaattaaagcaaatcatagagattatcatgttatgataactcgtggaaataaggtaatgaatttagctaacacacatttatttaatgatgatcattattttatttttccaaaaaatagacgagatgatgttacaaagttaccatttatagagtttcaagctgatccgatttatataaatcaaataaaacaatggtataacgataatttagaacaagattaccatgcaactattacagtggatcaagtagcaacttgcaaagaaatgttgattagtggtgtaggtgttacaattttgccggaaattatgatgaaaaatatcagcaaagaacaatttgagtttgaaaaagtagaaattgataatgaaccgctgattcgttcgacatttatgagttatgatccgagcatgttgcaattgccacaagttgattcttttgtaaatctcatggcgagctttgttgaacaaccaaaggcgtagttttagactaatttaaggtttgtatttaattttaaactattcggttaaattgaacgtagttgtttgctaacgcaccaacagcaaaagagcccctaattaataaattaaaaggggctctaagaagcggggttatggatatgtttgcagcgttattacaaataaagaattataaactctttgttgctaatatgtttctactaggtatgggtattgcggttacggtcccatatcttgttctttttgcaactaaagatttaggtatgacaacaaatcagtatggattacttctagcatctgcagcgattagccagtttacagtaaattcaattattgctagattttcggatacgcatcactttaatagaaaaattattattattctcgcattattaatgggtgcgcttggtttttcaatatacttttttgtagatacaatctggttattcatattactatatgcgattttccaaggattatttgcaccagcaatgccccaactttacgcatctgctagagaatctatcaatgtttcaagctctaaagatagagctcaatttgccaacacagtattacgttcaatgttctcattgggctttttatttggtccatttattggtgcccaattaatcggtttaaaaggctatgctggattgtttggtggaacaataagtatcattttatttactttagtacttcaagtgtttttctataaggatttaaacattaaacaccctattagtacgcaacaacatgttgaaaaaattgctcctaatatgtttaaagacaaaacgcttttattaccatttattgcatttattttattacacattggacaatggatgtatacgatgaatatgcctttatttgttactgattatttaaaagaaaatgagcaacatgtcggttatttagctagtttatgtgctggtttagaagtgccatttatgatcattcttggcgttttatcatctagattacatactcgaacattgttgatttatggagcgatttttggtggtttattctacttcagcattggggtatttaaaaacttctatatgatgttagcaggacaggtatttttagctattttcttagcggttcttttaggaattggtattagttatttccaagatatcttaccagattttccaggatacgcctcaacactattttctaatgcaatggttattggacagttaggcggtaacctattaggtggtgctatgagtcactgggtaggtttggaaaatgtattttttgtatcagcagcatcaatcatgttaggtatgatacttatattctttactaaaaatcaaaaaattacaaaagaggatatgatatcaacatgacaattattttatggctacttatcatcgctgccttcatgttagcatttgttgggttgattaagccgattattccttctgttttagtattatgggttggctttctaatctatcaatttggctttcataatcagcatttatcatgggtgttttatgtatctatggcattgctaacaatactaattttatgtgcggactttttagctaataaatattttgtgaatcgcttcggtggttctaagtttggagagtatgcagctttaattggtgtggttattggatgttttgttttaccgccatttggaattattattataccttttattttggtattcatagttgaattaatacaaggctattcatttgaaagagcagttaaagtaagtataggttcaatcgtagcatttttaacaagtagtatagctcaagcaatcattatgtttataatgattgtatggttctttatagatgctttattgattaattaataaaaagcttattgcaaaatatgtttttcggtaactgtaatttagtgattttatcattaacagtaccaaattcgcatatgatgtaataagctttttgtttataaaaatgtatgagaatgttttttcgaaatatttctttcaatgcgtaatccaataggcataactataaatgaaaatataataaatacccaattgcttacctgaatatatggtccaaaggcaagtaatgattgtggaataaagaatacatagaaaaatcctacaattagtagaatgattgctaaataggtgaatatccatatccaatttgaattgttaaaacactgcagttgtattgttttaaaactaaaccatataaataaaaagacaataaagaatccaacgactactgaaaacgggaatgaaacaaaatataaattacttccatttttttccatgaaaaatcctaaaaatcctttgagaaaactaacaatcccaattaatagaacgatgtgttgatagatatatttaaaaatatttttaaatgtttcattaggcatcgcttttagttcttttattgcatgtgcttttgggtcgtgattgaaaaaatctaaggctaataaaccatgttgttctgcgcttaataattgtttgagtatacggttaataattaactctgtatcatgagggttgacgcgaaagtcagagcgcatataagtcatataattctcgaagatttctctatcagtattgcttaatcttaatgatttaacattattttcttttgttaattgcgcagtacttttcattgttacttaagcgctcctttaaaaatgtttaattcctaattaaaatggaaatgattttatagtattaataaagtcaatcatatcatattaaacgcataaatataacgattaatattggagaggaaaatgaggacacttaataaagatgaacataattatatcaagcaaatagctaatatacacgagacattattgtcgcaagcagaatccaactataaatgtactaaactgagtattgctcttaggtacgagatgatatgttcaagattagaacatacaaatgataaaatttatatatatgaaaatgaaggtcaattaatagcgtttatttggggacattttagtaatgaaaaaagtatggttaacattgaactgctatatgttgaaccacaatttcgcaaactgggaatagctacgcaactgaagattgcgcttgaaaaatgggcaaaaactatgaatgcaaagcgaataagcagtacaattcataaaaataatttgccaatgatatctttgaataaagatttaggttatcaagtgagtcatgtgaaaatgtataaagatattgattagaattaggattatgttgctaattcatgttaaaattaaaaaagatttaatgacgttaaggagttttatatgaagaaattaatcatcagtattatggcggtcatgctatttttaacaggttgtggtaaaagtcaagagaaagccactctggaaaaggatatcgataatttacaaaaagaaaataaagaattaaaagacaaaaaagaaaagcttcaacaagaaaaagaaaaattagcagataagcaaaaagaccttgaaaaagaagtgaaagatttaaaaccttcaaaagaagataacaaggatgataaaaaagacgaagacaaaaataaagacaaagataaagataaagaggcatcacaagataagcaatcaaaagatcaaactaagtcatcggataaagataatcacaaaaagcctacatcaacagataaagatcaaaaagctaatgacaaacaccaatcataatcgtattgcttacttgttatagatgaaaggtacagcgttttaaaccttattttaagggtatgtattaattaaaatgtggtcatgattgaaacagaacgtaaaaatagacaacgtaattaataaaggagagaaacggcatgcatgaacaagattttagaattttagagggtcaagatattactttgccagaattaggtagagaattagaaaatattacaggacatacgattgctgattctactggcgaaattaagcgtgtaattgcacatttaccaaactttgagtccgatacagatacttttgttgctacatatcgtttaaaccatcaacaagattttatagatgcaacttttactgcgctgaaatcagatagagcacgtttaaaagaagtgccagttcatgttgaacttataagttatatttctaaatcaaaataaactgctatctaaaacgcaaagttgatcaaaatatcgattttgtgttttttattgagaaattatataggagtgtcaatcgatgatttattgtgaaacagagcgtttaatattaagagactggcatgaagatgatctgttaccttttcaaaaaatgaatgcgaattatgacgtacgtaaatattttccaagtttattgagttatcgtcgttcagaattagatatgagaactatggatgcggttattaaagattatggcattggattatttgctgtagaagataaagagtcccatcaatggataggctttataggtttgaattatattccagaaacaagcgattatccatttaaagaattaccgctttatgaaataggttggcgcttgttgcctgaattttggggaaaaggattagcaactgaaggcgcaaaggcaacgttgaagttagcagaagaacatcaaatatacgatgtctatagttttacagcagaagcaaataaagcctcacaacgtgtaatggaaaaaattggcatgacagtgtatgatcatttcgaattacccaatctaagtaagtatcatttattaaaaaggcaagtgcgctattacattaatcttcgaaagtgaaaaatttatacataatcgtaacaaacacccctaacattgtttagctgatgataacaatattaggggtgtttgtttattttttaaccttagaatgattaatcgtatgaacgagtacccagaggtttgaaatttaatattgattctattaatgattccttagtgtcgcataacggtgcaagagcacgatacttaggatcaataaaaccttcctcaatcatatggtcaatcattgtttgtagtggattgaaaaagccattaatattataaatggcaataggcttttcatggatacctatttgagcccaactatacatttcgaaaaattcttctagtgaacctgcgccaccaggagccatgacaaatgcatctgcaagttctgccattttatttttacgttcatgcatagaatcaactaaaattaattcagttaaacgttggcttgtgatttcatgttcatctaacattttaggcatgacgccaatagctttgccgccatgatttaatacaccatcttgaatggcacccataatgccaattgaccctgcaccaaatactaattcataaccttgttcagcaaaatatttacctaaatcgtatgctttttgtacatatgaagggtcatgacctttgcttgcaccacaataaactgcgattcgtttcatgttaatccagctccttaattcgatgaatgacttttaatagtgattgttcaaacactttttgatcttgctttgtaaaaggtgggggacctttgtggcgaccaccttgttttctaatttgtgcatttatatatcgtttatctaatagttgttgaatatttttggaattgtatatcttcccattatgatgcatgacaattaagactttgtcgactaataaacttgcgagtccataatcttgagtgactacgatatcatccttcgttgataattgaacaattttgtaatcaactgcatctggtccatcatcaacatataatgttgatacatgtggaggatataattggttcgaaaaatggctgaagctccgaataattgtcacaaaaatgcctgtctcagttgttaaatctataatagaatcaacaacaggacaagcatctccatcaataataatatgtgtcacaattatgcctctgtattgttttctttattttgttgagaggcgcttttggcaacataatctttatattttttaaatgacttgatgcgtgctttatcagcttcttgttggcgtttttgttcttctttgtgtcgtttttcaatatttttttgtaactttttattcattttagcgatttctttgcgatttttttcagctagtttatcgccttttttctcagttttctcatctaatttattaggtgttaagcctgctttttcttcgtatttttgtgattttttcatatctttaatacgttgtatttcattcttttcgcgggctttttgctcttctttatgacgcttttcgatatttttttgaagtattttattcattttatcagcgtctttacgattttgtttagctaatttttcgccttttttctcaatataggcaggatcatgttctctagcaaactttttaagttcacgtttattttcaaaatcttgttttttatcgccgacatattctttaacatcactcgctgtgttactgattgctgcagatgtttttgaagcaactttacttgtagcatctgtaactttttgtacgtccggatgttgtttgatacgtttacgttcaacaattaacggtaccaatacaattggtaatacattaatcataaatttgatgacttttttcttatccatagatcttgcctccataattactttattaattttacataccctatgatacatcaatataaacgatgatagtagtgaatcactattaagtatttcagatgttttttaaaagaagacaataaaaactgccaatcaagtggttccttaattgacagtctatattttaaaaggaaattaaatacctttaccaatgccaaatccgaagtaaagtatagcaataaagattactaatacaattctgtaaatggcaaatggaattagtttgattttgttaattagatgcaagaatgttttgattgcaattagtccaacagtaaatgcagctaaaaagcctaaaatataaaaaggtatatcagcaatctgaatatcttgataatgttttaataaagataaaccactagctgctaacataattggaacagccataataaatgtgaagtccgatgctgctttatgatttaatttcattaataccccagttgaaattgttgagcctgaacggctgaaaccaggccacatagctactgcttgagagataccaattacaaacgcttggaaataattgatttgatccactgtttgtgggtttttaactttaactgaatacttatcagcaataatcatatagatagcacctacgaataagccaatcataacagttggcacactaaataaatgttcttcgatgaaatcatcaaatagtaagcctaaaatacctgctggcaccatacccactaatacatgtaataaatttaaacgtcttggctttgaacgtctttgttgatcgttttctccttcaacatgtttgtgtttaccaatatgtaaaatctctaagaagcgttcgcggaatacccatgctgctgcaaagacggatcctaattggatgacgattttaaatgtaaatgctgattgagaacctaaaaattcagatgattttaaccacatatcatcaactagaatcatatgtccagtagaggaaacaggtgcaaattctgttaatccttcgacgacccctaagataataccttttattaattcaatgataaacataatgtacccactttcattactcaatttaatttatttaaatatcaaaattaccatatcatgatagcatattcatttaaagaaatgctagttatagttataatactagactaaagatgtatatattcattttcttttacatgtaaaactacaatattttattgagctatttaatttgattttaaggaaaaccttttataataggtttaggtgatataattgtgaaaaaattaacaacaatactgtttcaatataaaatttttccggtactcatgttcttggtcagtactggtctcggcatactcgttataacgcaaaatattttaatagcagattttttagctaaaattataagacatcaatttcaaggtttatggattgtattatttattttattaggtgttttacttttaagagcaactgtgcaatttctaaatcaatggttaggtgatacattagcatttaaagttaagcatatgcttagacagcgggttatttataaaaataatggtcatccaatcggtgaacaaatgactatactcacagaaaacattgatggtttagcacctttttataagagttatttgcctcaagtgttcaaatcaatgatggttccgctcatcataatcattgcaatgtttttcatccatttcaataccgcattaattatgttaataactgcaccatttattcctttgttttatattattttcggtttgaaaacgcgagatgagtcaaaagatcaaatgacttatttgaatcaatttagtcaacggtttttaaatattgctaaaggtttagtgacgttaaagctatttaatcgtacagagcaaacagagaagcatatttacgacgatagtactcagtttagaactttaacaatgcgcattttacgcagtgcttttttatcgggattaatgctcgaatttataagtatgttaggtattggattggttgcattggaagcaacgctaagcttagtagtatttcataatattgattttaaaactgcggcaattgcgattattttagcgcctgaattttataatgcaattaaggacttagggcaagcgttccatactggaaaacaaagtgaaggtgccagtgacgttgtgtttgagtttttagaacaaccgaactataataatgaatttctattaaagtatgaggaaaaccaaaagccatttattcagttaacagacatatcatttcgatatgatgattctgatagattggtattaaatgatttaaatttggaaatatttaaaggtgatcaaattgcacttgtaggtccaagcggggcaggtaaatccactttgacacatcttattgcaggtgtttatcagccaacaataggtactataagtacaaaccagcgtgatttaaatataggaatacttagtcaacagccatatattttcagtgcttctataaaagagaatattacgatgtttaaagatatagaaaataatactattgaagaagtgctagacgaagtaggtttattagacaaagtgcaatctttcacaaaaggcattaacacaataataggtgaaggaggcgaaatgttatctggtggacagatgagacgcatagaactttgccgtcttttagttatgaagccagatctcgttatatttgatgagcctgcaactggtttagatattcaaacagaacacatgattcagaacgttctgtttcaacattttaaagatacaacgatgattgtcattgcacatagagataatacaattcgccatttacaacgacgcttgtatatagaaaatggaagactgattgctgatgatcgcaatatttcagtaaatataacagaaaatggtgatgacttatgaaaacacgactaaaatttcaagtagataaggatttattgttagctatagttgttggtgtttgtggaagtttagttgcgctcgccatgtttttcttaagtggttatatggtgacacaaagtgcacttggtgcgccactatacgctctgatgattttagtcgttacagtaaaattgtttgggtttttaagagctattactcgatacgtagagcgccttatttctcataaagctacatttacaatgctacgtgatattcgggtacagtttttcggtaaattagtaaatgtcattcctaatgtttaccgtaaactgagttctagtgatttaatttcacgtatgattagtcgtgttgaggcattacaaaatatatatttacgtgtttattatccaccagtcgttatcggtttgacagcgctagttacagtcatagttttggcgttcatttcaatcggccatgcgctattgattatggttagcatgttgtttactttactcattgttccttggttaagctcaaaaaaagcacgtactttaaagaaacatgcagctaatgaacaggcccgatttttaaatcatttttatgattataaagctggtatggatgaactacgtcgatttaatcaaattaatcattatcgagataatttgatggctaaattaaatcattttgataaattacaacttaaagagcaacgctttttaacgatttatgattttatattaaatattattgctatgctttcgatttttggtagtttagttctaggattaattcaaattaatgcaggccaactaaatattatttatatgacgagtatagttttaatgatcttaactttatttgaacaagctgtaccaatgacaaatgtcgcgtattataaagcggatactgaccaagcattgcacgatattaatgaagtgatatctgtaccttctactaatggaaaaaaacgtcttaatgataagtatgatgcaacgaacatttatgaagttaaggatgctagttttaagtattggaatcagcaaacgtatgtgttgtcggatattaattttaatgttaatagaggcgaaaagattgcgattgtgggtccttcaggttcaggaaaaagtacattactacaaattatggcagggttatatcaattagatagtggctctgttcgtttcgaaaatatggatatgtttgaaatagatgacaaagataagtttgaatcgttaaatgtcttgctacaatctcaacaattatttgatggtacaatacgtcaaaatttatttaccgatgaaaaagatgaagcggtgcaagcaatatttaagcaattagatttagaacatttggcactagaacgtcaaattgacttagatggtcatacattatctggcggagaaattcagcgtttagcgattacgaggatgttattaaaagatactgcatcaacatggattttagatgaaccaacaactgcattagataaacaaaatagtttaaaagttatggatttaattgaagcacatgcagaaacattaattgttgctacacacgatttaactttattgtcacgttttgagaccatcattgtgatgataaatggtaaaatagttgaaaagggaaactatcaacaattactcgctaatcaaggtgctttatggaatatgattcaatataatgcataaaaaaactgcttgataggctaagaaacctttcaagcagttttttaactaacaagcttacgcgtgctaattgtttttctattcttaataaattctaaacattactttaattgtcatgacaaaagttaattatttttcctttgtttcatcaaatgcatgaatgactttacctaataagcgattaagttctttaacttcatcttgagataaagaagaagctgaagcgactttgtcagatgcattacttaattctggtctaatagtttcacttttgtcagtcaagtgaataaatacttcacgttgatcgacttcggaacgttcacgcttaattaagtctacttgttccattcgttttaataatggtgatactgtaccagtatcgagtgctaattcagttacgactttcttgacgtttacaggagattcatcccataaaattgttaagacaagaaattgtgggtatgttagattgtacttcttaaaaactttgttagagtagtagcgattaacttgtctttgagcattgtacaaactaaagcatagctgttcttttaaattatgttgatcagacattaaagttctcctccagacatactatccgtttttttctcttttcggattggtaatcattaaaaagttgattgtttattaattcacaactttctttgattcaatgccatgctaaaattaaagtatgtttaaagtttagaagatatttttgattaaatcaagcaaaaagataatttaatatatatgttatcatttttaaaaataactgtaatagaaaagagaatataaaatgaaaaataataaagatgaaaaaataagaatatccataattaacggatttttgggtagtggtaaaaccacgttactgacacattatattagtgaattattaaaaaatgatgagaaaattaaaatcatcatgaatgaattcggtacttttgatattgatagcaatagtatttcaaatgaaattgaagtccattcattgattaatggttgtgtttgttgcgatcttaaacaagaacttgtctatgaactaaaagccattgctttaaaaggggacgttaatcatgtcatcatagaagcgacaggcattgcgcatcctttggaattactagttgcatgtcaagatccgcaaatcgttaatttctttgaaaagccgattatttatggtgtattagatgcgactcgatttttagaacgtcatcaatataccgaaaatacagtttcgctgatggaagatcagttgaaactaagtgacatgattattattaataaaattgatcttataactgatgacagtcttgagaaaattgataagcaattaggtatgatttgtgcaagtattccaacttataaaacaacctatggaaaagtttcgttggaagaattggacttaactgttaaagacagagagatatcgtctcatcatcaccatcatcatgggattaaaagtatgacttacacgtttacaggtccgattgatcgtcaattgttttatcaatttataatgaaattaccggaatctgttctacgtttgaaaggttatgtgtcatttagaaatcaaccaaatgcaatttatgaatttcaatatgcatatggtttaccagactatggaataattggcatgcaattaccattaacgattgttattattggtgaaactttagatacaaatcacatacgtaatcaattggatatgctacaatttacgtaaatcagaaaatgtgttgtttcaatttaacggaaatagcacattaatttcttaatacttttattgtgaatattttgtgacattgagggatggagtggatgagatatggaacaaataatgattaatcactatgttcatttttctaggcttgtacaaggtttttggcgtgcaaatgaatggaagatgactgcgaaagagttaaattattttataaatgaattagttgaacgtggaattacaacgatggatcatgctgatatttatggggattatcaatgtgaatcactgtttggtaatgctttggatttatcacccgaattaagaaataaaattcaaattgttacgaaatgtggtatcattttgccttctaagcaatttgattttacaaatggacatcgttatgatttgagtagtaagcacatcgtgaaatctgttgaacagtcattaatcaatttgaatgtagattatttagatagtctactcattcatcgtccttcaccattgatggatccagaacaagttgctgatgcattaactaaacttgttaaacaaggtaagttgaagtcattcggggtgtcgaattttaatcattcacaataccaattgttaaatcaatatattatgaaagaaagactacatattagcatcaatcaattagaattatcgccatatcacgttgatagtttacaagatggaacaatggattcaatgtatcaaaaccatgttcaaattatggcttggagtccttttgcaggcggtaaaattttcgacaaggaagatattaaagcgcaacgtattatgaaagttgttcaatcaatagctgacaaatatggtgtgagtgacacagctgtgatgatagcatggttagtaaaaataccgcatagtatcatgccgatacttggaacaagtcagttaaagcgtattgatcaagcaatcgaagggctacaacttaatttagatgatcagtcgtggtttgacatttacaccgctattatcggacaagatattccgtaaacttatttacttttaaatcataaaggagcatatcatgacaaacgaagataaacgtttcgaacaattaagatttgaacgcaaatttatagttattccgtatttaatttatgcagtcattgtattactattaaatattttctattctgatttgaaaataacaatgacattattcggacttttctttgcgtataatgtagtcattttgttcatagcatttattaaacattataaacgcacattgttactaagtcttatattaacagtgcttagtggcgcggcattctttggaattatttatgtttatggcattaatcatttttaaatattaaaaagagactatctacaataatctcatttgcattttatctaactaagtttaacttttgcttagaaaaatgatgctatgaggatattcagtagatagtttttttatgatctaatatttaaacttagatatcgttttgtaattaaccgagataactcatcacctagcaatattatttacaaaatatttcgataaaattgtgtattttgcataaattaaaaatgtatgttttaaaaaattgttataattaaattaagattaaacaaaggggtgactgttatgtcagaagaaaaacatgtagtggaacatgaacaacaaaagaaagaaaagacaaaaaagcaatacaagccattttggattgtcatgagttttataatacttatagttgtactattactcccggcaccttcaagtctgccgataatggctaaggcagtactagctattttagcttttgcagttattatgtgggtaacggaagctgtatcatatccggtgtcagcaactttaattattggcttaatgatattacttttaggatttagcccggttcaaaatttaggggagaagctaggtaatccgaaaagtggcagtgctattttagctggaagtgaccttctaggaactaatcatgcattatcattagcgtttagtggatatgcaacttcagctgtagctctcgttgcagctgcattatttttggctgctgctatgcaagaaacgaatttgcataaaagactagctcttttagtgttatcaattgttggtaataaaactagaaatatagttattggagcaattatcgtttcaattgtacttgcatttttcgttccttctgcaacagctagagcaggggcagttgtaccaatcttgctgggtatgattgcggcatttaaagtttccaaagatagcaagttagcgtctttattaataattacttcagtacaagctgtgtcaatttggaatattggtatcaaaacggcggcagcacaaaatatcgtagcgattaattttataaaccatcaattaggatttgatgtttcatggggcgagtggttcttatatgcagcgccttggtccatagttatgtccgtagctttatatttcatcatgattaaagtgatgcctccagaaattaatacaatagaaggtggtaaagatttaataaaagaagaattgcataaacttggccccgttagcccacgtgaatggcgtttaattgttatatcgatgttattattactgttttggtcaactgaaaaagtattacatccgattgactctgcatccattactattattgctttaggtgttatgttaatgccgaaaattggtgtcatgacatggaaacatgttgaaaataaaataccatggggaacaattatcgtgtttggtgtaggtatttcactagggaacgttcttttgaaaacaggtgcagctcaatggttaagtgatcaaacttttggtgttttaggtttaaaacatttacctattatcgcgacaattgcacttatcacgctttttaatatattgattcatttgggctttgcgagtgcaacaagtttatcatcagcgttaatacctgtttttatttcgctaacctctacgttacacttaggagaccagtctataggatttgttttaattcaacaatttgttattagttttggtttcttattacctgttagtgcacctcaaaatatgttggcttatggcactggtacttttacggttaaagatttcttgaaggcaggtataccattgacaattgtagggtatattctagtgatagtttttagtatgacttattggaaatggttaggtttgctttaattaaaaatataaataagaatctaggttattttaaagtgacaaaaagcttaataaaataaaaagataattgaagggtgttttgtttatggcaattgctgtgttattaaatcgaatgtttcgaatggaacacaatccattatttgaatatatttatcaacaaaaagaagacattgatgcatgttattttatcattccggaagaggacatgtcttcagcttctgatttgaaagcacagttttatcgcggtactttgcagcgcttttaccaatcgttgcacgcagaaaagcttacaccttatgttatgtcttatgacgatatcatttcattttgtaaagagaacaatatctctgaagtagtgattgcgggtgatattatgagttatcatcttgaagaatatgatattttacatcaacgttctttattcaatgaagcacgtattgccgttactttaattcgtgggaatcattactttaaagcgagtaaaacaatgaatcaacaaggggagccatacaaagtttttactagtttctatagaaaatggcgaccttacttgaggcatagagacgtatatcactatgatttaaaatcattcgaagactttgtcattgcatcacctgatgatttagtgtttgatgacatagtgtttggatcctcacaagtaattgaacagaataaatggcaacattttttagatcaagatatacagaattacgaaagcggaagagactatttacctgaagtgttaacaagtcagctaagtgttgctttagcatatggattattagatattattgaaatttttaatgatttattggcgcgttatgatgaagatgaggcaaaccatgaagcatttatacgtgaactcatttttagagaattttattatgtgttaatgacacagtatccagaaacctcataccaagctttcaaacctaaatatcgacagataaaatggtcgcaaaatgaagcgaattttaatgcatggtgcgaagggcaaacaggatttccaatcattgatgcagcaataatggaattgacacaaactggttttatgcataatcgaatgagaatggttgtgtcgcaatttttaaccaaagatttatttatagattggacatggggagaaaaattctttagaaagcaccttattgactatgatgcagcatcaaatattcatggatggcaatggtctgcttctacaggtacggatgcagtgccgtattttagaatgtttaatccaataagacagagtgaacgctttgatgctaaagctttgtatatcaaaacatatcttccgatttttaatcaaattgatgcaaaatatttgcatgatacacaacgcaatgagtccaacctttttgaacaggggattgaattaggtagtcattatccaagacaaatggtagatcatcaagaaaaacgtacacaagttttagctacatttaaagcgctagactaattcggctcaattgatagatctggcatgagtaaaatctggagcagaatataaagttcttaagcaatataaataagccaatttctattattgatgtgatagaaattggctttcctcaaatatataagttgtatttagttttcttattaaattgatgttatcttagtatgtccgtaaataaagtgaggtatagtacgacatactctaaaaacgtagcgagataaatatatttcaatctaacttttatgttttgaggcacttgccatttaggatattgtcgttcgtaatacgacacttgttgtataaatacacctagtccaaatggcagcatcatgagtaagatacttcttaaataacttaaaccaatatcatgccatatgtgtccaataatcaattgaaagacaatgatagatactattaaaacgattatatttattgtcacttgttcaaacgcactccttttccaaataatagaattgctgcttgcatgacaaccataaaacatacaaacatagcagttttaagcgttagactttctagaatgtgatttagaacatgtaagggctcattaaagaaataaacggaatgtaagcgtaagaaacgaccaatataaattccgaatccatttaaaaacattagcacgacaacaattaatctattaagccaacggtgagaagtcaatgttagtatttcaaaatagattaaaatcatcacataaaccgctaagaagacaccaagcagtaaataggtaaagtatttccactcacttaaatttagtcctgcgtaaaagttgaattgaaattggttcaaatggattaaatcagttaccatataaaatgtatttggtaaaagtaacacaaatataaaactatatatgataaagagtggccattcatactttttattcggtttgaataatcgtaataatagactaagctcaaaaggtatatatgctaaaaacaaatttaaagtcataaattgaaaaattttagtctcaaaaagggagacgataaataaaattaaaaagtaaattctagcgatgtatcgagattgcatcaataataaacactactttctaatgaaaaagttattcattcaaatgtgatagttataaacgcattcaattcctaattaaaaatttaatttaactcgttgaagtatattaataaacgagaatgcatttatgattaagcacttatgataacttgtaataaaatttgattcaactaaaaagtaaagtgctattgaggatcaagtaaatttaaaccgactgcatctttgaatgaacgttgaatgtccaaatcagttacagtaagaatgatttcagcagttgcagaaacaattgctttagcgagatgtccgctaaaagtttcatatgattgagtaccgaaagtagcatgcaaatgtgcaaaatgaccattgtctagacgagaaatattacctaataagctcgtcaattccagtggctcagtaatatgtttttcttcgtattgtttcgttgttaaattgaaaaattttaatacaacgtcatcacatgcaccaatgccgctgacagatgtaaatgttaagtcttggtcatctgcaaaggttgttatacattcaacgatatcttctcctttttccaacactagtagtatagtatgattacttttttgcaatttcatatgatcaatcccctttactttaatatgtcattaattatacaattaaatggaaaatagtgataattacaaagaaaaaatattgtcaaatgtagcaatgttgtaatacaatatagaaactttttacgaatatttagcatgaattgcaatctgtcgtggaaaagaagaataacagctttaagcatgacatggagaaaaaagaggtgagcatatgaataaacagatttttgtcttatattttaatattttcttgatttttttaggtatcggtttagtaataccagtcttgcctgtttatttaaaagatttgggattaactggtagtgatttaggattactagttgctgcttttgcgttatctcaaatgattatatcgccgtttggtggtacgctagctgacaaattagggaagaaattaattatatgtataggattaattttgttttcagtgtcagaatttatgtttgcagttggccacaatttttcggtattgatgttatcgagagtgattggtggtatgagtgctggtatggtaatgcctggtgtgacaggtttaatagctgacatttcaccaagccatcaaaaagcaaaaaactttggctacatgtcagcgattatcaattctggattcattttaggaccagggattggtggatttatggcagaagtttcacatcgtatgccattttactttgcaggagcattaggtattctagcatttataatgtcaattgtattgattcacgatccgaaaaagtctacgacaagtggtttccaaaagttagagccacaattgctaacgaaaattaactggaaagtgtttattacaccagttattttaacacttgtattatcgtttggtttatctgcatttgaaacattgtattcactatacacagctgacaaggtaaattattcacctaaagatatttcgattgctattacgggtggcggtatatttggggcacttttccaaatctatttcttcgataaatttatgaagtatttctcagagttaacatttatagcttggtcattattatattcagttgttgtcttaatattattagtttttgctaatggctattggtcaataatgttaatcagttttgttgtcttcataggttttgatatgatacgaccagccattacaaattatttttctaatattgctggagaaaggcaaggctttgcaggcggattgaactcgacattcactagtatgggtaatttcataggtcctttaatcgcaggtgcgttatttgatgtacacattgaagcaccaatttatatggctataggtgtttcattagcaggtgttgttattgttttaattgaaaagcaacatagagcaaaattgaaagaacaaaatatgtagcataagtattttggtgtatattgatataaagtaaagcgtaatattatgaatgattagcatcgtttttcttatgaattttattaagaaaattcgatgctttacatttaaaaagattcgattgactaaatgttttactctttatatttaaatgttatatgtaacaaaaaatgattttgagtaataaacatgttacaaatattacattctttttaaattgcaatccacatacctaattcattaacgttaatgtgttaagatgataaaaaatgagtaaggaaatgtgggtaaggggatgacagtaaaaaatttatttttaggctttgttgctgtaatattaaccgtttgtttaattggtttattaatattagcaacaaatgaagatgcgcttgctaaggtacataaaacaattaatacgcttaacgcgataaatgtatcaactgaagatacttataaaaagaaaatggatattctcaatattcatactgctaaagcatctgaagtgaatgaaaatgtggaaaagcaaaatcattttaaacatcgtgtgaatgcaaataaatcaaattcttttaacgaacaagagtgccaagttattgctgatcgttatgcagataagcatatcaatgataattatggtttagaaagaatttctaagacaaatcatggatataattatgtttattccaatgataattcaactagtaagcaacatgtaagtatttcaaatcaaggcataataacgaaataatagatggaacagtgtattctaattggatatactgtttttattttgcaataatttaatttaaaaaggtgaaatcaacttataaaatgatgtaaatgttatgtcaaaatcaaccaatccgtaatgtattttaaaatgttaatatagttctgaagaagtataaatgaggtgttgaaatggctaaaaataagaaaacgaacgcgatgcgtatgcttgatcgtgcaaaaattaaatacgaagttcatagctttgaggtaccagaagaacatttatcgggtgcagaagtcgcagaacttatacaagcaaatgttaaaacagtatttaaaacgcttgttctagaaaatacaaaacatgaacattttgtatttgttatcccagtaagtgaaactttagatatgaaaaaggcagctgctttggttggagagaagaaattgcagcttatgcctttagataatttgaaaaatgtaacgggatacattcgtggtgggtgttcgcctgttggtatgaaaacattgtttccaacagtcgttgacaaatcgtgtgaaaattatagtcatatcagtgtgagtggtgggcttcgaacaatgcaaatcacaatagctgttgaggatttgattacaataactaaaggcaaaattggagcagttatccatgaatgattaataacaacaaaaagtatggggcaagattaggagtgtggcagagatgaaatttttataaaattcatttctgccacactcctttttgattgaattagcattttacgatcataaacagtcattataattgagtatttgaacataaaaatgtaattttatcgtcacaatttgggtgtttgtgattgtttttggtaatttatgattgaaaagtgaaagcgtactcattataatacaaagtgagatggggtgatgatgataattactgaaaaaagacacgagttaatattagaagaactttcgcacaaagattttttgactttacaagaattaatagatcgaactggttgcagtgcttcaacaatacgaagagatttatctaaactacaacaattagggaaattgcaacgtgtgcatggtggtgcaatgttaaaagaaaatcgtatgattgaggcgaatttaactgaaaaattagcaacgaatcttgatgaaaagaaaatgattgctaaaatagcagctaatcaaatcaacgataatgaatgcttatttatcgatgctggttcatctacattggagctaattaaatatattcaagcgaaagatatcattgtggtaaccaatggtttaacacatgtagaagctttacttaaaaaaggtattaaaacaattatgctaggtggtcaagttaaagaaaatacacttgctacgattggttctagtgctatggagatattaagacgatattgtttcgataaagcttttatcgggatgaatggattagatattgaacttggattaactactcccgatgagcaagaggcattagttaaacaaacagcaatgtcattagccaatcaatcatttgtacttatagatcattctaagtttaataaagtatattttgctcgtgtacctttgctagaaagtacgacaatcatcacatctgaaaaagcattaaatcaagaatcgttaaaagaataccaacaaaagtatcactttataggagggactttatgatttatacagtgactttcaatccttcaattgactatgtcatttttacgaatgattttaaaattgatggtttgaacagagcaacagcaacatataaattcgctggggggaaaggtattaatgtctcgcgcgtcttaaagacattagatgttgagtcaactgccttgggatttgcaggtggatttcctgggaaattcattatagatacattaaataacagtgcaattcaatcgaattttattgaagttgatgaagatacacgtattaatgtgaaattaaaaacaggacaagaaacagaaatcaatgcaccgggtcctcatataacgtcaacacaatttgaacaactgttacaacaaattaaaaatacaacaagcgaagatatagttattgttgctggaagtgtaccaagtagtattccaagcgatgcgtatgcgcaaattgcacaaattacagcacagacaggtgctaaattagtagtcgacgctgaaaaagaattggctgaaagcgttttaccatttcatccactatttattaaacctaataaagatgaattagaagtgatgtttaatacaacagtgaactcagacacagatgttattaaatatggtcgtttgttagttgataaaggtgcgcaatctgttattgtctcgcttggcggtgatggtgctatttatattgataaagaaatcagtattaaagcagttaatccacaagggaaagtggttaatacagttggctctggtgatagtacagttgcaggcatggtggctggaattgcttcaggtttaacgattgaaaaagcattccaacaagcagtcgcatgcggtactgccacggcatttgatgaggacttagcaacacgggacgctatagaaaaaataaaatcacaagttacgattagcgtacttgatggggagtgaaaataatgagagtaacagagttattaacaaaagatacgatagcaatggatttaatggcaaatgacaaaaatggtgttattgatgagttagtaaatcaattagacaaagcaggtaaattaagtgatgtcgcgtcatttaaggaagcgattcacaatcgagaatcacaaagtacaactggtatcggcgaaggtattgctattccacatgcgaaagtagccgcagttaagtctccagctatcgcattcggtaaatctaaagaaggtgtagattaccaaagtttagatatgcaaccagctcatttattctttatgattgcagcgccagaaggtggcgcccaaacacatctagatgctttagctaagttgtctggtattttaatggatgaaaatgtacgcgagaaattattacatgcttcatcacctgaagaagtactagcgattatagatgaggctgatgatgaagtgacaaaagaagaagaggcagaagctgaagcacaacaagttgcaactgcagaacaatcatctaaacaatctaacgagccatatgtgttagcagtaactgcttgtccaacaggtattgcacatacgtacatggcacgtgacgcattgaaaaaacaagcggataagatgggtattaaaattaaagtagaaacgaacggttcaagcggcattaaaaaccatttaactgaacaagatattgaaaatgcaacaggtatcattgttgctgctgatgttcatgttgagacggatcgcttcgatggtaaaaatgtcgtagaagtaccagtagcagatggtattaaacgcccagaagaattaattaataaagcattagatacaagtcgtaaaccttttgttgcccgtgatggtcaaagaaaaggtaactcaaatgacagtcaagaaaaattaagcccaggtaaagcattctataaacacttaatgaacggtgtttctaacatgttgccacttgtaatatctggtggtattttaatggcaattgtatttttatttggagcaaattcatttaatccaaaaagctcagagtacaatgcgtttgcagagcagctttggaacattggtagtaaaagtgcattcgcgctaatcattccaattttatctggattcattgcacgtagtattgcggataaacctggtttcgcttcaggtcttgtaggtggtatgttagcaatttcaggtggttcaggatttattggtggtattattgcaggtttcttagcaggttacttaacacaaggtgttaaagccatgacacgtaagttaccacaagcattagagggattaaagccaacattaatttatccactattaacagtgacagctacaggcttattgatgatttatgtctttaatccaccagcatcttggttaaatcatttgttattagatggattaaacaatttatcaggttctaatattgtattattaggtttagttattggcgctatgatggcgattgatatgggcggtccattcaacaaagcggcatatgtttttgcaacaggtgcgttgattgaaggtaatgcagcaccaattacagctgcaatgattggtggtatgattccaccgttagcaattgcgacagcgatgttaattttcagacgtaaatttacaaaagaacaacgtggttcaattatccctaactatgtgatgggtatgtcctttattacagaaggtgcgattccatttgcagctgccgatccattacgtgttattccttcaatgatgattggttcaggtataggtggcgcaattgctttaggcttaggttctcgaattactgcgccacatggtggtattattgtaattgttggtactgatggtgcacacttacttcaaactcttattgcacttctagttggtacattagtttcagcattaatttatggacttattaaaccaaagttaactgaaacagaaatcgaagcttcaaaatcaatggacgagtagttttaatgatgtaaaatgattgttagcaaagagcttcatattaagttgtaagttcaatgaatatatgttagttttatacatcgtgttaacggtagcttatacaaagctgtaaaaacactttctattaattcagtttttatgaattgatatgaaggtgtttttatttttagataaatgaatgaagaaatagacaccacaaatgtatagacttttttaatattttgcaaaaagttatgccaaacgaagcagatatagtaaaatatgagtgtcttaaagtgaaaatttataaataaagaagggtttatacgtgtcagaattaattatatataacggcaaagtttatactgaagatggcaaaatcgataatggttacattcatgtgaaagatggacagattgttgcaattggagaaggggatgataaagcagcaattgataatgatacgacaaataaaattcaagtgattgatgctaaaggtcatcatgtattaccaggttttattgatatacatattcatggtggttatggtcaagatgcaatggatgggtcatacgatggcttaaaatatctatccgaaaatttgttatctgaagggacgacatcatacttggccactacaatgacgcaatctactgataaaatagataaagcacttacaaatattgctaaatatgaagcggagcaagatgttcacaatgcagcggaaattgtaggtatacatttagaaggaccatttatatctgaaaataaagttggtgctcaacatccgcaatacgttgtacgcccatttatcgataaaattaaacattttcaagagactgctaacagattaataaagattatgacgtttgcacctgaagttgaaggtgcaaaagaagcgcttgaaacgtataaagatgacattattttttcaattggtcatacagtggcaacatacgaagaagcagtcgaagctgttgagcgaggagctaaacatgtcacgcatttatataatgcagcgacgccattccaacatagagaaccaggtgtttttggagcagcatggttgaatgatgctctacataccgaaatgattgttgatggcacacattctcatccggcatcggttgcaattgcttaccgtatgaaaggtaatgaacgtttttatttaattaccgatgcaatgcgtgcaaaaggtatgcctgaaggagaatatgatttgggtggacaaaaagtaactgttcaatcgcaacaagcacgtcttgcaaatggtgcgcttgctggtagtattttaaaaatgaatcatgggttacgtaacttaatatcatttacaggtgatacattagatcatttatggcgagtaacaagtttaaatcaagccattgcattaggtatcgatgatagaaaaggtagtattaaagtaaataaggatgcagatcttgttattctagatgatgatatgaatgtaaaatctacaataaaacaaggcaaggttcacacatttagctaataaataatcataattaaatgtatgcaatagatttaatctgttaacataagcactttatattatgataaaatagaagcaataacatttttttctgggggtgtctaaatgggaaggcgataacatgtagttgtaatttaagtcatagtgataaatttgaatgcgtgttacccatgagtgacacatataacatggaggtgaatccctagaaatagggaattaattggaaacttcgaccataattagtttgattatatttattctattaattgcattaaccactgtatttgttggttcagaatttgcattagtaaaaattagagcaacaagaattgaacagctagcagatgaaggaaataaacctgctaaaatagtaaaaaagatgattgctaatctagattattatctttctgcttgtcagttaggtataacagtaacatctttagggttaggttggcttggtgaaccaacgtttgaaaagctattacacccgatatttgaagcaatcaatttaccaactgcattaacgacgacgatttcgtttgcagtgtcatttataatcgttacgtatttgcatgtagtacttggtgaattagcgcctaaatctatagcgattcaacatactgaaaagcttgctttagtatatgcaagaccattgttctatttcggtaacattatgaaaccattgatttggctgatgaatggttctgcacgtgttattattagaatgtttggtgtaaatcctgatgcccaaactgatgcaatgtcagaagaagaaatcaaaattattattaacaatagttataatggtggagaaatcaaccaaactgaattggcatatatgcaaaatatcttttcattcgatgaaagacatgcaaaagatataatggtacctagaactcaaatgattacactaaatgaaccttttaatgtagacgaattactagaaacaataaaagaacatcaatttacgcgttatccaattactgatgatggtgataaagaccacattaaaggatttattaacgtcaaagaatttttaactgaatacgcttctggaaaaacgattaaaatagcaaactatatacatgagttgccaatgatttcagagacaacacgtatcagtgatgcattaattagaatgcaacgtgaacatgtacatatgagtcttattatagatgaatatggtggaacggcaggtattttaacgatggaagatattttagaagaaatcgttggagaaattcgtgatgaatttgatgatgatgaagtgaatgatatcgttaaaattgataataagacattccaagtaaatggcagagtactattggatgatttaactgaagagttcggtatagaatttgatgactctgaggatattgatacgataggtggatggttacaatctcgtaataccaatttacaaaaagatgattacgtggatacaacttatgatcgctgggttgtttcagaaatcgataaccaccaaattatttgggtgatattaaactatgaatttaatgaagcgagacctactatcggacagtctgatgaagatgaaaaatcagaatagatattaatatataaaccaactaagaatgatttaattcatttttggttggttatttttttgactaaaattaatgaaaagtgaaaatagtattggaactcaatatctttaatgatttaatgaatattttttattgaaagcgataattcgcattaattgagtttgttgaaaaatttagggtaatgtaaagatataaaagatacatagattggagagatataaagatgttgaatgagatacaaatattaaataatggatacccgatgccttcagttgggttaggtgtttataaaatctctgacgaagatatgactaaagttgtaaatgctgcaattgacgcaggctatagagcgtttgatacagcatacttttatgataatgaggcttcactaggacgagcattaaaggataatggcgtcgatagagaagatttgtttataacaacgaagttatggaatgactatcaaggttatgagaaaacattcgaatatttcaacaaatcgattgaaaatttacaaactgattatcttgatttatttctaatacattggccttgtgaagcagatggtctatttttagaaacatataaagctatggaagaactttacgagcaaggtaaggtaaaagcaataggtgtatgtaattttaatgttcatcatctagaaaaattaatggctcaatcaagtatcaaaccaatggtgaatcaaattgaggtacatccatattttaaccaacaagaattacaagaattttgtgatcgtcacgatattaaagtgactgcatggatgcctttgatgagaaatagaggactactagacaaccctgtcattgttaaaattgctgaaaaatatcataaaacaccagcacaagttgtattacgttggcatttagcacacaatagaattattattccaaaatctcagacacctaaacgcattcaagaaaatatagatattttagattttaatttagaattaacagaagtagctgaaattgatgctttagatagaaatgcaagacaaggtaaaaatccagatgatgtgaaaattggggatttaaaataactggatgttaaattttacgtttatgaatgccttttaatgtgtacattaaaataaatgagttggtttttactatttgataaaacaatactcaggtacattcaaaatcttttaaataaaaaggatggacatagatgaaaattagagtcgtcattccttgttttaatgaaggggaagtcattacacaaacacatcaacaattaactgaaatactttcacaagatagtagtgtgaaaggctatgattataatatgcttttcatagatgatggaagtacggataccactatagatgaaatgcaacatcttgccacaatagataggcatgtcagctttatttcttttagtagaaattttggaaaagaagcagctatgattgcaggttaccagcatagtactgaatttgatgcagtcatcatgatagattgtgatttgcaacatccacctgaatatattccgaaaatggttgaaggttttatggaaggctatgatcaagtgattgcaaagcgtgatagaagtggtgaaaattttagtcgcaaaacattaagccatttgtattataagttagttaattgctttgtagaagaagtacaatttgatgatggtgttggtgattttagacttttaagccaaagagctgttaaatccattgcatcacttgaagaatataatcgattttcaaaagggttatttgaatggataggctataatactaaagtgtttacgtatcaaaatgttgagagacaaaaaggggaatctaagtggtcctttaaaaagttatttaattatggtattgatggattgatttcctttaatagtaaacctttgagaatgatgatttatcttggcttgtttatcttttcaataagcgtgctatatattatctatttattcatcaatattatgatatctggtgttaatattccaggatatttttcaacgattgcagctattttattattaggcggcatacagttaatttcaattggtgttgtaggtgaatatattggcaggatatattatgaagttaaggcacgtcctaaatatattattcaagctacaaatctttcaagtattgaaaatgatgagaaggatacccataaagtttattctaaataaacaaaaaaagaagccctcattaatgggagcttctttttagtctttgcattttattttataaataaatcggattatgacgtaatgtctaatttgtgtaatgttacagtcatcgtagttcctacatctatatcactgcttacactgatttttgcgttattttgttgcgcgagttcattagctatatataagcctaatccagaaccacccgtttttgtattacgagagttttctactctgaatgtacgttcgaatatacgttcttgtagttctggtataatgccaataccttcatcgctaatagcaatgtcgatagtatcttgatctttgttttcactaatattaatatcaatgcgactaccaacatttgaaaattttagcgcattatcaagtaagtttgttaaaatacgctcaagtggcgttcgatattgataaaatgcatcaatttcgctacagaaattcacttctaatgtgcggttttcatgtttgatacgttgctcatatggttgcaatattgatacaagtaattggtctagttgtattaattctgggggatatgttttacctgtatttaaagtgataatatgagtcatatcatcaaataatgttgataatctgtttgcttgtttaattaatatgtcgtatgactctttaatctcatgatcctttgtgattataccatcacgtagtccttcagaatatgaaataatgcttgctaaaggtgtttttaaatcatgggctaagttttgaatcagttctgttttttcttgttgttcggatttaatttgattcatttgttgcgtaatttcagaagccattttattaaaagattgatttaattcataaatttcttttggtgaattaaacgttttatcattgcttgcgtaatttccgttagcaaattgcttagtttttatattaaactgcttaattttttgtataagtggattaataaaaatactacatattaataaggttaaacagcttgtaattattgtcgttaaggtcaaagttagtgtcatatggccgttaaaccacattaaaatatatgcaattgctaaaatagttgaagttaatagtatactcgatacgacgccaataatgatttgacttctaattgataacaccattatcggctcctttcaaatttatatcctaatccccatacagttgtgatggtatatgttgtaaagctctctttttctaatttttctctaatacggtgtatatggacattcacggtattagcatcttcgtaatagtcatatccccaaactttttcaagtaattctgatttagaaataacttcattttctctagaagctaaataccacaataactcaaattccttaatacgcatagggacttcgtgaccatttacagtcacaactttacttaagttaataagtgttaattcatcaaacgacagttgttcaactggttgatgatggtatttcttcattcttgtaagtaaattattaatacgtaaaacgagttcccttggactaaatggttttttgacatagtcatctgcacctaaagttaaggcgtaaatggtatcatgttcttgtgttttggcagttaaatagataaaggggatatctaatttttgccttttcatttctttgacaatgtcgtaaccattaacttctggcatcatgatatcaagtaccatgatatcaatatcatttgatagtaaagaaattgcttctttaccgctagttgtcgttgttactttgtaaccttcatattcaaaataggtttgacaaatgtctacaatgtcttgttcatcatccacgatcagtaagtgggtcatctattttttcacctctgttcttacgacctctaaagtaattaatgatttctttaagtgaaatctgttttaacaatgagtgactcattagtaaaaggataaagaaagttaattgaagaggatacgtaaatatcatatctgctaagatataatttatcataacaaaggctccaaagaaactagcagcatatgcaaaaactccaaaaattaaacctaatccaattgcaatctctccgagtgggacaacaatatcaaataatgacgtcgtatgtgcaactatatttgcgaaaaaccacttataccactctggtgaatcagtattgttagcgatgactggtactaaacctttcagcgtaaatccgcccgttaatttttcgtagccttgcattaacataacaatacctgaacccacacgaatgataaatgtaacgagtagcaataatttattcatgatgttcacattctttctatttattgtgtgtaatttatataaacataagattaagcaacataatgcgatttgtagtgttatgtgaacaggaagtgtttgagctcatgggttgcttaagctaaacaaacctcaagctctaaaaaaattttacttatgtgctctacaatcttatgggatttaatagttgtatatatattgaaaaaaggaaagtatgatttctacaagctaggggggctgtgaaatcatacgctttccattgagtaatgagtgtaatgtatatttttaaaatttgtaatgtatagtaatagtatgttgtatataaaagtttaactcagaaattgattattttaatttagcgccgccgaagatgacgtgagcttttttacaatagattgttacttcatcatatttgcttaaatctacatttttaagatcaaatgtttgtttttctttatcgtagtcaaccattgcgatttctttaccgtttttaatgtcgccattttttgttaggtagacgtataaatctggaccttttgatgatttgtagttagtaagcattaatttaccatttttaatctcagctttaccttcaacagtttcaccgtttttagaactgaatgtacctgttaggtgttttgttttatcagttttaacattgctatcttctgactttgttttttgttcagttttgttaccttgatcttgtgaattagaattaccacaagcgcctaaagttaatacagaggcaacagcaccaactgctaaaaaatattttgtattcatgctaactcctcatttcttcaatttgataagttaagtttaaaatgaaggcaaataatatgccattaactaattcttaacttcgtttaaatatcgcttaactaatattgaagaaagaataatttgaaaatgaaaataattgtctgatttaaataaataggagtcaaaataagaggagggcatttttttaggtgagaaaatatttatctgaactagataacactataaaacacttctgatattttgaactaagaatatcagaagtgttttatagttttggtattaaaatttataaaccttttgccacaataaaaacaacaagaaaataagatagacgattaaatacaagtaccaatatggtgttaaaaccatcataacgataaatgaaatgttaataatgataagtcctttaatcattagtttctttattttgttattattttcagcagtttcatctaagctattaaatgttgaaataaacaacataataccaccaatgatgaaaattgcaggggctaaaaatggaatagacatatatattgattgtgtacttgaaaagtcggtaacacgttgcgttaaactgacaacaatcgttaatatgatagcaataaatttttggtctgtaatgtatacaggttttaattttttatcaatgtaaaactgtagtatcgtccaaatgataaacatcgttatagtacacagagtaataaagttatatttatcaattatgaatgtatttataaaggcgtttatcgtaatagataacaacattgcacttaatgataaatgttgcatttgatgcctatataaattgaatccagttataagtacgacgatagcaatattaattaatatatataaaatcatgatggactcctgttcgttatacttcaatcaactattatatcaattaatatattgttattcattagatatgacttgtaaaaagtaaaataagttatcctttatacaccttttttattactccaaagtaatgtatgaagttgtggtaacacataaacgtgattcatatcattactttgcataactaaatccaccaactgctcgtagcgttctaacaacttttcggtatgattatctacgctgtctgataaatatgggttaccaacttgtaaatagaagggaatatctggataacggtggtgtatcattttggcaaaatcataatctttatcgtcgaatacaactacttttaagtttaatgaggaaggtacgcattgtgtaatcacttcatctaacttttttaaatcaggtgtcatagttgaacttggtggttttggactaatcgttaaatcatcaatttgtgtcatccaaggttggaatttactgccttgtgtctccagtgcgctgaaaatacctttatcttgaaataagtcaactaactcttggatacctttaattaatgctgggttaccaccagaaattgtaacgtgattaaataaatcgccaccaattcgttttaattcatcataaatttcttcagcggtcatgagttttatatcgcctttagcactaccatcccaagtaaatgcagaatcacaccagctacagcgataatcacatccagctgttctcacaaacatcgtttttctaccgattactcgaccttcaccctgaatggttggaccgaatatttcgagtacaggaattttagccattagttacacctgttcctttggtctaaatacaacataacttgttggtgtttctcttacaaatacttgaatacattttggttggtgttcgagcgatgccaaattttctttaacaatttgataaattgtttccgctacgatttcagttgaagggattttgtttttaaaagcaggtaagttatttaacagttgatggtcaaatttaccgtgtatcatctttttcaaatggctaaagttcactaagaagccagtgtcatctagtttatcaccgacaattgttaaattaacaaagtaagtatgaccatggacattttgacaaatacctgcttcttcacaaggaatgtgatgtgcagccgaaaaattaaaatctttatttaattcgaattgatatggatgcgttgtactaggatagatttgttgtaacattttaaagcgctcctttactttcaagatattgatttagtccacgttgacgtaaatgacaagctggacattcaccacagccatccccaatgataccgttatagcatgttaatgtttttgtacgaatataatctaaaacttcgagttcatcacttaatttccacgtttctgctttgtttaaccacattaaaggagtatgaatgacaaaatctttgtccatagctaggcttaatgttacgttcattgattttataaaactatcgcgacagtctgggtagcctgaaaagtctgtttcacatacgcctgtaataatatgcttagccccaatttgataagctagagcgcctgcaaacgacaagaaaagtaaatttctagctggaacaaatgtattaggtataccatcttcattattagtaatttccatatcatgttgtgttaatgcgtttggagtaagttgtgataataatgacatatctaaaacgtgatgtttcattccttgatcttgtgcaatttgttttgcgacttcaatttcagtatcatgtctttggccataattaaacgttacgagttcaacttctttgaaatgtttttttgcataaaagagacatgttgtactgtcttgaccaccactaaagacaacgatggctttttcattatttaatacactttccattttgtaattgctcctatcattaataatattaataaagaggttaatggcattgataagcccgtttttaatttataaaataaaaaaagcctatctccataaaagatagacgaaagaaatgggttgctcctataatatatattaaaggtttaccaacgaatgtttgaaatttcaatgtctagttttttatagagggtttcagctagaaacctctgatattcatttatgtacgatgaatagaatataccatatattagttaaaatcaaggtcaggataatgacaatgcttttaaagttttagctacatccaatacatattataaaaataaaacacatttagaacggagtatacaatgattctagtcatagataataatgattcatttacatataatttaatagactatattaagactcaaacgaaactaacagttcaagttgttggtattgataatctgctgatagaagacgtcattaatatgaagccaaaagcaattgttatttcgcctgggccgggtaatccggatgattatcctatcttgaatgaagtgttagaacaattttatcagcgtgtacctatactaggtgtatgtttaggatttcaatgtatcgtgtcttattttggtggaaatatcattcacggctatcatcctgtacacggacatactacacagttacgccataccaatgaaggtatttttcaaggactgcctcaaaatttcaatgtaatgcgttatcattcattaattgctgacggagcgacttttccaaattgcttaaagattacagcaaaaaacgatgaagcgattattatggcatttgagcatattagatttccggtttttggtgtgcaatatcatcctgaatctattttgagtgaatacggttatcgacaagttgaattatttttatcgaaggtaggtgattactgtgagaatagaatataattatcgctactatttaactgaaaatgaatataagcaataccatattcaattaaagggatttataaagaagtatgttgctactaagttggctgatgtgggagaagtgatacactttgcacaagcgcagcaacgacaaggtagatatgtctcgttatatttaagttacgaagcggcaaagtattttaatcatgttatgtgtacacattcattagctaaagatgatatttatgcagtagcttatagttttgaaaaagcggaaagcataaattcaacatatgaacatcaaacttcttatgtatcaaagcatcatttttcatttgttgaatcttctgaggttatgatgactaatattaaacgtgtccaacaagcaattgttgaaggtgaaacgtatcaagtgaactatacggcgcgcttaacggataacatttattatcctattagtactttatatgaacgattaactcaatttagtaatggtaattatactgcgttattacaaactgatgaaatccaagtagcgtctatctcaccagaattattttttcaaaaaggacaatttaacaatgtcgataacgttatcataagcaaaccgatgaaagggacaatgcctagaggtaaaacggaagctgaagatcaacagtattataaaacattgcaaacttcttcgaaagatcgtgcagaaaatgtcatgattgttgatttgctaagaaacgatatagggagaatatcacagagtggctcaattaaggtgtataaactattttttattgaggcatataaaactgtatttcaaatgacttcgatggtaagtggaactttaaaaactaatacagacttaactcaaattttaacatcgttatttccttgtggttcgattacaggtgcaccgaaactgaatacaatgaaatatattaaacaatttgaaagttcacctcgtggtatatactgcggagcaattggactattacttccaactgaagatgataaaatgatttttaatattccgattcgtactattgagtataaatatggacaagcgatttatggagtcggagcaggtattacaattgattctaagccaaaagatgaagtaaatgaattttacgcaaaaaccaagattttggagatgttataatgcaattatttgaaacaatgaaaattgataatggacatatccctagacttacttatcatactaatcgcataaaatgttcttctgagcgattaaactttaaatttgatgaacatgcatggcgaaatgaattaaacgatgtaacaacaaagtatcacagtggtcaatatagacttaaaatcgtattaaatgctgaaagcaaatttgaaacgatagtgtcacctttacctgagaaaagtagttttacagcaaaatttcaagtgttgcccaaagtagttaatccaacttttataaaaaataaaacgacagaacgaaagcatttagcacacaatcatgaaacagatttaatattgctaacttcagaggacggcaaggtccttgaatttgatattggcaacattgtcattgaagaggatggaaaatggtacacaccaagttataaagatgatttcttaaaaggatgcatgcgtgattatttaatagatagtgacaaacttgttgaaaaagactttaataaaaacgaattgatttataaatatcataacaatgagatacgtttatttttgataaatagtttacgagaggttgccgatgtccacctttgcctttaaaattagtatgataataaagtagaaaatgatgtgaaaacaaatttaaaaattaaatggggccaaatatgattattgtttatattgtgctgttgttaattcttgtatacgtaaattatcgattagtgaatcgattgctatctgaaaatagaatatatgttgttcgtttgatagtaacaattactactgttataagctttatccttgtatacgcattaattcacgaacttatgccttttgttgtgcgggcaatggatttaatgtaccaccagtaaatttagtgagtaggtaaaacgaactattcaatcgattctataattaaaaatgaaagtaaagtaaccaaatattgaagaggtgtacaaatgaaaatatatagtcaaggtgaccaagccattgtagtcgcaattgaaaaagaagtatctaaaagtttaaccgaagatttattaacacttcgctcatatttaattgaacaaaattatccatttattatagaaattgtgccatcagaatcagacatgatgattgtctatgacgcaagggatatgattaaacaccataatatacaatcaccttttttatacatgaaagcactaatagaatcgattcatttaaacataaaacatgattttaaccagcaagatttgattgaaataccaattgtgtatggttcgaaatatggtccggatatagaatcacttttaaaacattacaaaatcaagctagaaacttttattgaattacattctaagacgcaatattttgtttcgatgatgggatattcacctgggtttccttatttaactggattaaataagaaattgtatattaatcacacgagtaaacagaaaaaattcattccagctggttctgtagtacttgaagggaaaaaatgcggtattgtaacaacggatacaattaatgattggttagttattggttatacaccattatcactttttaatccgaaagaatcagatttcgcacgcttaaagttaggcgataatattaaatttagacctatcaatgaaaatgaattagaagtaggagcgtttaaagatgtcaatcataattgaaaaaagtggcttattcagtagctttcaggactttggtagaaggggatatgaacatgatggtgtaattccatgtggtgcacttgatactttagcacatgaaattgctaatcgattagttgctaatgacaagaatgaagcaactttggaaatgactaataaaatggcaacgattcgttttacagaacctacgctgattgcattagcagggggtaatgtcaaagcttacactgagcatatgactatatctccatataaattgtatttgttagataaaggcgatgttttaaagtttagagaaacaagttatacatcgcgagtgtatttagctgtgggaggcggatttgaattagatgcatggttaggatctaactcaaccgactttaatgtaaaaattggtggttttaaaggtagaacattacaagatggcgatgaaataaagcttaagagagattatacagctcgtcatcataagttatttgaaaaccttgctcacacgaaacaaacagattggggtattgatggatacgccttgtcatttaattatatgtctgatgtatttcatgtcgttaaaaataaaggtacggaagattttaaagaagatgccattcaaagatttgtgaaacatgattataaagtaacgagcaaagcaaatcgcatgggaatgatgcttgaaggtgaaaaaatcaaagctttttatgaagatatgccgccgtatcagactgtcaaaaaaggaacgatacaaattaagcgtgatggcacacctattatcttattaaatgatcattatacgttaggtagctacccgcaaatcggtacaatcgcaagttatcatttaacgaaattagcacaaaaaccgcaaggatcacgtttgaaatttcaatttatagatattttaacggctgaaaagaaccttgttaagtatagtaactggttaaaccaattattccatggaatagaatatagaatgcaattagaaatgatgaaataatatttggtacgtagctcatactcgagtccgatgcaaataatttcctcctaatgtataatgaaataatactgtgttttatctgcgaaatgtatcattttctaattcgtttcacagtaaaatgaaaagataaagtgtgtttttacttgaattttgactaaaattactctatatttattaattgagctatgcttattattacaatttgattacaaattttaaatttgttaattgaatgataatattaaataaagaaacttacacaagcaaatatgagttgtagcccaaaatacttgttaaatcaaagttgaaagctacaagtaatgaaaattataaacttgaatctgaaagtaattactataattatgacaatgttaacttttaaacgcacttattaattaactacataatgttaatatctaatttattcaagtactttcgcaagatttattatctaaataacgggggaaagaatcatgagttcacaaaaaaagaaaattagtctttttgcgttcttcttattaaccgtaataacgattaccttgaagacgtatttttcttattatgttgatttttctttaggtgttaaaggtttagtacaaaacttaatattattgatgaatccttatagtttagtagcactggttttaagtgtgttcctattctttaaaggcaaaaaagcattttggttcatgttcataggcggcttcttattgacgttcctattatatgccaatgttgtgtactttagattcttctctgattttttaacgtttagtactttaaaccaagtaggtaacgtagaatctatgggtggtgcggttagtgcatcattcaaatggtatgactttgtttatttcattgatacgttagtttacttattcattttaatatttaaaacaaaatggttagacacaaaagcatttagtaagaaatttgttcctgtcgtaatggcagcttcagtagcattattcttcttaaacttagcttttgctgaaactgacagaccagaattattaacacgtacatttgaccataaatatttagtgaaatatttaggaccttataactttacagtatacgatggtgttaaaactatcgaaaataatcaacaaaaagcgttagcatctgaagatgacttaacaaaagtattaaattatacgaaacaacgtcaaacagagcctaacccagaatattatggggtggcaaagaagaaaaatattattaagattcatttagaaagtttccaaaccttcttaattaataaaaaggttaatggtaaagaagtaacaccgtttttaaacaaattatcaagtgggaaagagcaattcacatacttccctaactttttccatcaaacaggtcaaggtaaaacatctgactctgaatttacaatggataacagtttatacggtttaccgcaaggttctgccttttcattaaaaggagataatacgtatcagtcattaccagcaattttagatcaaaagcaaggctacaaatctgatgtcatgcacggtgactataaaacattctggaacagagaccaagtatataaacactttggtatcgataaattctatgatgcaacatactatgacatgtcagataaaaacgttgtaaacttaggcttgaaagacaaaattttctttaaagattctgctaattatcaagctaagatgaaatcaccattctattctcatttaattacattgactaaccactatccattcacattagatgaaaaggatgcgactattgagaagtcaaacacaggtgatgcaacagttgatggttatattcaaacagcgcgttatttagacgaagcattagaagaatatattaatgacttgaagaaaaaaggattatatgacaattcagtgattatgatttatggtgaccactatggtatctctgaaaaccataacaatgccatggaaaaactattaggtgaaaaaatcacaccagctaaatttacagatttaaacagaactggtttctggattaaaatccctggtaaatctggtggtatcaataatgaatatgctggtcaagtcgatgtaatgccaacaattttacatttggctggtatagatacgaagaattatttaatgttcggtactgatttattctctaaaggtcataatcaagtagttccattcagaaatggtgactttataacaaaagattataaatatgttaatggtaagatttattctaataaaaataatgaactcataactactcaaccagctgatttcgaaaagaataaaaagcaagttgaaaaggatctcgaaatgagtgacaacgtgcttaatggtgatttgtttagattctacaaaaatccagacttcaaaaaggtaaatccttcgaagtataaatatgaaacaggacctaaagcaaactctaaaaaataatatttaaacacgaactcggattgataaaatatcaatccgggttttattatgttcttttatattatgttttacagtatatgtgttgataaaaaggtatattataaaaatcattagcatagtcatcaaagccttatcaagttttatttatagttgaagcaacaatatattaaattatgacacttaacggtatcgatttcttttgatttcaaaaaggtgtataatgtatagaactgatttaagtacgtagagatttcaacagaagaaggaagatgggtatggaagcatataaaattgaacatttaaataaatcttatgccgataagactatattcgataacctagatttatcaatttcagaaggtgaaaaaataggtttggtgggcataaatggtacagggaaaagtacgttgttaaaagtaattggtggtattgatgatgattttacagccaatgttatgcatccaaatcaatatcgaattcgatattcgtctcagaaacaggaccttaatgaagatatgacagtttttgatgcagtattaagttctgatacaacaactttacgcatcatcaagcaatatgagcaggcagtacaagcttatgcggatgaccaaagtgataaattgttcaagcgaatgatagatgcgcaagatgctatggatcaacatgatgcttgggactataacgctgaaattaaaacaatcctctcaaaactaggtatacatgatactactaaatacattaaagaattatccggcggacaacaaaaacgtgttgtacttgctaaaacattaatagaacaaccagatttattgttattagatgaacctacgaaccatttagacttcgaatcaatcagctggttgatcaattatgtgaagcaatatcctcatacagttttattcgtaacccatgatcgatattttttaaatgaagtttccactagaattattgaactaaacagaggtaagttagcgtcatatcctggtaactatgaatcttatattgaaatgcgcgctgaaagagaagtaacacttcaaaagcaacaacaaaagcaacgagctttatataaggaagaacttgcttggatgagggctggagctaaggctcgtactacaaagcaacaagctagaattaatcgatttaatgacctagaaaatgaagttaaccagcaatataaagacgataaaggtgaattgaatcttgcttattcaagattaggtaagcaagtgttcgaattagaagacttatcaaaggctattaatgataaagtattatttgaacatctgacggaaattattcaaaaaggtgagcgtattggtgttgttgggccaaatggagctggtaaaacaacactcttaaatattttgagtggagaagaccaacaattcgaaggtaaattgaagactgggcagacggttaaagtagcttattttaagcaaacagatgagaccctggatagagatattcgtatgattgattatttaagagaagaaagtgaggtcgcaaaagaaaaagatggaacctcggtatctattacacaacttcttgaacgatttttatttccaagtgcaactcatggtaaaaaagtttataaattatctggtggagagcaaaagcgtttgtatttattacgtctactcgtacaccagccaaatgttctgttgttagatgaaccgacaaatgatttagatactgagactttaacaatacttgaagattatattcatactttcggtggtacagtgattaccgtaagccatgatcgctacttcttaaataaagttgcacagtcatattggtttattcatgatggtcagatggaaaagattatcggaacttttgaagattatgaaagttataaaaaatcattagataaaaataaatccacattgaagcaacaatctaaatcttatacaactgtacgtaagaaaaatggtttatcatataaagaaaaattagaatatgaacaattgatgaaacgcatagaacaagcggaagtaagaatggaagaaattgatgtgctcatgattgaggcaagtgcagattatgggaaaattaaagaactaaacgaagaaaaagaacaacttgaaattcaatatgatttagacatcacaagatggagtgagttagaagaaattaaagaacaacaataaggggtcaatttatgatgcaacaaacattatcgcattactttgggtatgaaacatttcgaccaggacaagaagaaattattagcaaagtattagaccatcgtaatgtgcttggtgtcttaccaactggtggaggtaagtctatatgctatcaagtaccaggtttattgttaggtggtacaacaattgtaataagtccactaatatcattaatgaaagatcaagtggatcaattaaaagcgatgggaattcaagctgcttttttaaatagtagtttgactcaaaaagagcaacaacgtattgaaaaagcattatcaaatggagaaattcaatttttgtatgttgcaccagaacgatttgaaaaccgatattttttaaatatgcttcagcgtataaagattcacttagtcgcgtttgatgaagcgcattgtatttctaaatggggtcatgatttcaggccgagttaccaaaatgttatttcaaaagtatttacgttacctcaagattttacaataatagcgttgacagcaactgccacggttgaagtacagcaagatattagagaaaagttaaatatcgctcaaactgatcaaattaaaacgagtactaagcgtagaaacttaatttttaaagtaaatcctacttatcaacgtcaaaaatttatattggattatattaaaacacatgatgaagatgcaggtattatttattgttctacacgtaagcaagttgaagagcttcaagaagccttagaaagtcagaaaattgaaagtgttatatatcatgcaggtttgagcaataaagaaagagaagaagcgcagaatgatttcttatttgatcgtgttaaagtagtcgttgctacaaatgcttttggtatgggtattgataaatccaatgtacgttttgttattcattataatatgcctggagatttagaatcttattatcaagaagcgggtcgtgcaggtcgtgacgggttgaaaagtgaatgtattttgttatttagcgaacgcgatatcaatttacacgagtattttataacagtctctcaagctgatgatgactataaagataaaatgggcgaaaagttaactaaaatgattcaatatacaaaaacaaaaaaatgtctagaagcaacaattgtccattattttgaaccgaatgaaaaattagaagaatgtgaacaatgtagtaattgtgttcaacaagataaatcatataatatgacacaagaagctaagatgattattagttgcatcgctcgtatgaaacaacaagagagttatagtgttatcattcaagtgttaagaggagagtcaacagattatattaagtataaaggttatgaccaaatttcaacccatggtttaatgaaaggttacacaacatcagaattaagtcacttaatagatgaattaagattcaaagggttcttaaatgaaaatgacgaaatattaatgtgtgatacttcaattaaaaaattactcagtaatgaagtagaagtattcacaacaccatttaagcaaaaagcgactgaaaaagtatttataaatacggttgaaggggttgaccgagtattattcagtcagttggtagaagttcgtaaaaagttaagtgacaaattaacgatagcacctgtaagtatattttctgattacacgttggaggaatttgctaaacgtaagcctgcttcgaaacaagatatgattaatattgatggcgtaggtagttacaaattaaaacattattgtccagcatttttagaaacgattcaaaattataaagccaaagtatagtgaaggcacctagtaagcattccttgttttactgggtgtttttttgaattcaaggtaaaataacactatttcttaactggagattacctattattcattattttgttaaaaaagttcaaggataaatcatttaaatttgaaaattgtaataaacgtggttaaatagggaatacatacatataatctcggttttatgctatgagaaaaaaagaggtggcaaagtgattaagtttaaaaatgtaactaagcgttatggcaaacatgttgctgtcgataacattagtttcaatattaatgagggtgaattttttgtgctaattggaccttcaggttgtggaaaaactacgacattaaaaatgattaatcgactcattcacttaagtgaaggttatatttattttaaagataaaccaataagtgattatccagtatacgaaatgcgttgggatattggatacgtattgcagcagattgcattattcccacatatgacgatcaaagaaaatattgcacaagtgccacaaatgaaaaagtggaaagaaaaagatatagataaaagagtagatgaattacttgatatggttggattagaacctgaaaaatataaaaacagaaaacctgatgaattgtcaggggggcaacgacaacgtgtaggagttatacgtgcgttagcagctgatccaccagttattttaatggatgaaccgtttagtgcattagacccaatcagccgagaaaaacttcaagatgatttaattgaattacaaactaaaattaagaagacaatcatatttgttacacatgatattcaagaggcgatgaaacttggtgataagatttgtcttttgaatgaagggcatattgaacaaattgacacaccagaaggatttaaaaataatcctcaaagtgaatttgttaaacaatttatgggtagtcatttagaagatgatgcgccatgtgttgaagagaacgcaattattcgtgacttggatattatgaaaccaatcgatgaggttacatctatgagcgcttatccaattgtttatgacaatcaaccaattgaagtattgtatcaacatttatcagagagcgagcgtgtcattgtcatgcaagaagatagcgtaggtcaatatgttattgataggaaagatatcttcaaatatttgtcccagaaaaaggaggtagctcaacatgactaactttttcgacatattgagtgaacgtaaggggcaactcttttcgacaatgatagaacatattcaaatatcatttattgcattattgattgcaactgctattgcggtaccattaggtattttattaacgaagactaaaacgatatctgaaatcgtaatgaatattgcggcaattcttcaaaccataccatcgttggcattattaggtttaatgattcctttatttggtatcggtcgtgtgccagcaattattgcacttgtagtgtatgcgttgttaccaattttaaggaatacgtatactggaattaaagaagttgatccatcactcattgaagcggctaaaggtataggtatgaaaccatttagacgtttaactaaagtcgaacttccgatagcaatgcctgttataatggctggtgtaagaacggctatggtattaattataggtacagcgacactagcagcattaattggtgcaggcggactaggagatttaattttattaggtatagaccgtaacaatgcgtcattgatattattaggtgcaattccagcagccttattggcaattatatttgatttaattttaagatttatggctaaattatcttataaaaagttattgatgacgttaggtgttatagtgatgattattatactggccatcgctattcctatgtttgcacaaaaaggtgataaaattacgttagctggaaagcttggctccgagccttcgattattacaaatatgtataaaattttaatagaagaagagaccaaaaatactgtagaagtgaaagatggtatggggaaaacagcatttttatttaatgctttaaaatctgatgatatagatgggtatttagagtttactggaacagttttaggtgaattaacaaaagaaccattgaagtcaaaagaagagaaaaaagtttatgaacaagctaagcaaagtcttgaaaagaaatatcaaatgactatgttaaaaccaatgaagtataacaatacgtatgctttagctgtaaaacgtgattttgctaaacaacataatatacgtacaattggtgatttaaataaggttaaagatcaacttaaaccaggatttacattggaatttaatgatcgtccagatggttacaaagctgttcaaaaggcttataatttaaatttagataacatacgtacaatggaacctaagttgagatatcaagcgatcaataaaggtaatattaatttaatagatgcatattcaactgacgctgaattaaaacaatatgatatggttgtgttaaaagatgataagcacgtatttccaccatatcaaggagcaccattatttaaagaaagctttttaaagaaacatccagaaattaagaaaccgttaaacaaactagaaaacaaaatatctgatgaagatatgcaaatgatgaactataaagtaacagttaaaaatgaagacccatatacagttgcgaaagattatttaaaagcaaaagggttaatcaaataacgaccaacgccacataagatgcgtaacaccaaattatatcttatgtggcgttgttatatttaaatctataattatgttcaatttaaacatgcaataatgattaaaaaatatgacatgttaaacacaatgtaagctattatgatgtgaaaatagtagcattgcattttagaaacatagagcgatataatgaatataagttttttaaaatttcagttaattctaaggaggttgtttttattatgaaagaacaacttaatcaactatcagcatatcagcctggtttatctccaagggcattgaaagaaaagtatggcattgaaggagatttatataaacttgcatcaaatgaaaatttgtatggaccatcgcctaaagttaaagaagcgatatcagcacatttagatgagttatattattatcctgaaacaggatcaccgacattaaaagcggcgattagtaaacatttaaatgtagatcaatcacgcattttatttggtgcgggattagatgaagttatattaatgatttctagagcagtattaacgccaggggatactattgttacaagtgaagcgacattcggtcaatattatcacaatgcgattgttgaatcagctaatgtgatacaagtacctttaaaagatggtggcttcgatttagaaggtattttaaaagaagttaatgaagatacgtcattggtatggttatgtaatccaaataatcctacaggtacatattttaatcatgagagcttagattcgtttttatctcaagtacctccacatgtaccagtaattatagatgaagcttattttgaatttgtgacagcagaggactacccggatacacttgctttgcaacaaaaatatgacaatgctttcttattacgtacattttcaaaggcgtatggattagcgggtttacgtgtaggatatgtggtagcaagtgaacatgcgattgaaaaatggaacatcattagaccaccatttaatgtgacacgtatatctgaatacgcagcagttgcagcacttgaagatcaacaatatttaaaagaggtaacacataaaaatagtgttgaacgcgaaagattttatcaattacctcaaagtgagtatttcttgccaagtcaaacgaattttatatttgtaaaaacaaagcgggtaaatgaactttatgaagcacttttaaatgtagggtgtattacgcgaccatttccaactggtgttagaattacaattggttttaaagaacaaaatgataaaatgttagaagttttatcaaattttaaatacgaatagtaagtggggagtgggacagaaatgatattttctcaaaatttatttcgtcgtcccaccccaacttgcattgcctgtagaatttcttttcgaaattctctgtgttggggcccctgactagaattgaaaaaagcttgttacaagcgcattttcgttcagtcaactactgccaatataactttgtagagcattgaacattgatttatgtctcaagctcaatgcagtgtgaatgatgaggtgagagtattcagtgtaaaaagcaacaatagatgatattgttttgtatcaattgcttttttgctatactgaatcaatactgatattttgaggagaagattaaaatgacccgtaaatcaatcgcgattgatatggatgaagtattggcagatacattaggagaaatcattgatgctgtcaattttagagcggatttaggtattaaaatggaagctttgaatggtcaaaaacttaaacatgttattcctgaacatgatggattaattacagaagtattgagagaaccaggcttcttcagacatcttaaagtgatgccacatgcacaagaagttgtgaaaaaattaactgaacattatgatgtatatattgctacagcagcaatggatgtaccaacatcatttagtgataaatatgaatggttactagagttctttccatttttagatcctcagcattttgttttttgtggtagaaaaaacatcgttaaagctgattatttaatagatgacaatcctagacagcttgaaatttttactggtacaccgattatgtttacagcagtgcataatattaatgatgatcgatttgaacgcgtaaatagctggaaagatgtagaacagtattttttagataatattgagaaataaaatatatcacttgaaaaatttcatgtagaaaagatgatggataggctataaagtaattgtgactgagatgaacttttatgtcttagacactacaacactatattggcagtagttgactgcggggccccaacatagagaaattggattcccaatttctacagacaatgcaagttggcggggccccaacatagagaaattggaacgccaatttctacagacaatgcaagttggggtgggccccaacataaagaaatactttttctttagaaattagtatttcttatgggagtgggacataaatcaatgttctatgctctacgaagttatattggcagtagttgactgaacgaaaatgcgcttgtaacaagcttttttcaattctagtcaaccttgccggcggggccccaacacagagaaattggattcccaatttctacagacaatgcaagttggggtgggacgacgaaataaattttgcgaaaatatcatttctgtcccactccctcctatttttaagtacacattagctttgactaatgataaagaatcgctacataatcaatcattagtcgttctttatcatttccgtcccgctctcaataaatgttagtctatctcattattataaatcggatgaatgtgttaatctatggcagattacacgtcatccgattttttatagaatttgaaaaagacgcataaaccactatgatttaaaatacaacatcaatcattttagtggcatgcgccaaaattatatgtctgtttttgaaacagggtaatagcttaaagctaataaaaacgaatataaggtgcgttgaatcttatgattacactccaaacctaatataatatcgggtcaagatcattccggatgcttacaaatcattgacagtaagtaactgaatagcatttggtataacctcaatatcaataggtgtttctaatgaaatttcgccatcaatatcaactttcattgctggatctgttgtaagtgaaatctttttaccaggtatatgctcaataccttgagtaatttcattccaattcatgctatcacgctttttaaaaatatcatttaaaatactgaaactttgttcattaaaaatgaaagtgttcagttcaccatcttgaggagacaaatcagtcaatggtatacgactaccaccaatgaatggaccatttgctgttagtatcatggtcgtttcgccagaatatgtcttatcatctattgataattgataattaaattgtgttggatttagcagtgttttgacagttgatccaatataactcaatttaccaaatatatcttttgaaccatcttgtacgttttcagcgttttgaacaatgagacctaagccaacaaagttgagtgcatattgattatttattttaattacatcgtatgtaccaacttgtgcagaaatcatttgttcactagcttgtttatgattaggtgctatatttagcgtttttgtaaaatcattaaaagtaccgcctggtaaaatgccaatagggagttgaaggtcatgtgacataacaccatttataagttcgttaaccgtgccatcaccgccaagaataaataatatatctacatcttttgcatagtttttagttttgatttcttggcaatatttaataatgtcaccttcgttttcactcaattgaatagaaagatgcttacaaattgaacttaatgctgttgtaacttccccaataccttgattaatattttttaatccactgtgttcatggtaaaagaggacaccatgtgtatatttattttccatagtttagcctactttctaaaaattggttcattaaatatatatacccacttttaattgttaataccaaaaatatgtttttaaatagagaaaatggtaataactgacattgatgtctatagagtgggacgagaaaatatagttatagctgtctataacgagcatattaagcttttatttatactgatatcttgaatttaattaatagaaacctataaaaaaacagtaagccatttaaatgacttactgttttttgaattaggccaacaatattaacgtatacctttcatcgctttgatgattaaaggtgagaatgctaatacaattgttgtaacaataattgcaacaacacctaggaaaataaagtaatttgtttgacctagtggttctattaacttaactaaagtaccattgattgcttgtgcagaagcgttagttaagtaccaaatactcatcatttgggcattaaatgctttaggtgctaacttaacagcagcactattacccgttggtgataagcatagctcaccgataacacaaataatgtacgataaaataacccagttaactgagaagtttgatgaacctgatgcataacctacaataccaattagtatgtatgacgcacctgctaagaacgtaccaattgcaaattttactggcaggctaggttgtttagttccaagcttttgccataaaagtgaaataattggagctaataataaaataaataatgggttaattgattggaagatcgcttcaccaaagtttgttttccaaccaaataagtttaatttcatatctgaatgttcaattccatatatgtttaatacattagacccttgttcttgaatagcccagaacaccattccaagaataaataatggaataaatgctttaacacgagaacgttcagtatcagtgacatctttacttctaataattaaagtgaagtaaatgattggtaatgcaatacctaatactaaaacagtattactaactaagttaaatgataatgagttagttaatgcaccaataacgataattaatacaattgctaagacaacacttccgataataagaccatactttttcttttcagctggtgtcaatgggttagtaggtttcataccaacgctacctaagtttttgcggttgaaaagtacataccatactaaacctaatgccataccaactgctgcaatcaagaatccgccgtggaagtttttaacattaacaaagtgttgcaaaataataggtgataataatgcacccatattaactgacatatagaaaataacaaaacctgcatccatacgtctatcattttcaggatataaacggccaacgatatttgaaatgtttggcttcattaaacctgaaccaataatgatgaagaacattgatgtgaataagccgattaatgcaaatggtaagcttaaacaaatatgtccgataataataaagactgcacctaataaagtagcgcctctagtgcctgtaattctgtcagcaatccatccgcctggtattgatgtcatatagattaatgaaccataaactgacataattgacatagctgttgttttatcaattccaaggccattatctgttacggcaaagtacatgtagaaaatgagtagggcacgcatgccataataactaaacctttcccagaactctacaaagaagagtacgcctagtcctcgaggatgcccgaaaaatcctgtttgaggtatgtcttgaatttgatttccatgggagttttgttgtgtcatgtatacatcccatcctttcttcccctaatacaatagtttaagtaaatttgattgtgccttatcaactaaatattccaacaaatcacaaaaaaataaaaatattgagaatattctgttattaagcgcgcacaattaattagagataatataaaaatatacttattgacgttaaagtgcaataggtttctataaaaatgttgtttaattcgtgtactaatattcttttggtgtactttggtataaaatgttattttaatgtaacctattatgtatgctaaatgaaaaacacaccaataagttaggaaaatcaacttattggtgtgtttattaaatgatacatttaacgattatctattttttcgggatataaatcatgattcatcaaacgatgctcagccattttttcatatttagaatttggacgtccatagtttgtataaggatcaatagaaattccaccacgtggtgtgaacttgccccagacttcaatataatgtgggtccataagctctatcaaatcattcataataatattcatacaatcttcgtgaaaatcaccgtgatttctgaaactaaataagtataatttcaaagattttgattcaaccattttaacatttggaatatatgaaatatagatagttgcaaaatctggttgcccagtaattggacataatgatgtaaattctggacagttgaattttacgaaatagtcacgaccttgatgcttattatcaaacgattctaatacatcaggacgatagtcaaaattgtaagtattgtcttgatttcctaataaagttatatcttgtaattcatcttgttgacggccatgtgccatataaagcgctcctttaaatttatttttttattattttggcgtctcggcgtgctttttcaaacatgtaataacttgcaccgataataacgacgtaacctaatgttgcatagaaatctggagattctccgaatagaacaaatccaagtattgctgtgaaaattatagatgcatacgtaaaaatagaaatatcttttgctgctgcaaaactatatgctaaagtaacaccaatttgacccacagcggcagctaagccagcccctaatagataaagtatttgcatctgactcattggttcataagtatatgcagtgaaaggtattaaaacgatgacagaaaataaggagaagtaaaatactatagtatatggtgcttctcttgaactaagtgctcgaacacatgtatatgctgatgctgcaaaaatacctgagaataagccagctaatgatggaatcatagatgatgaaaattcaggtttcactattaaaagcatacctaaaatagcaattatcattgctgtaatttgatacttccttaccttttcatgtaagaaaacaatgcttaataaaatcgtccagaaaggattgagtttcattaatgaatcggcatcactaagtaccatatgatcaatggcataaatatttaacaatacaccaataagtccaagtgttgatcgtgttattaataagggttgacttgaaagtctgccaaacattggctgatggtatttatataaaaaaaataatggaataaacattgctactaagtttcgtgctaatgatttttgaaaaacaggaaggtcacctgcaagtctgaaaaacactgacataaaactgaaaccaatagccgaaattaaaatggcaatgataccttttactttaggattcaattttatcgcctcttttatataaaattaacgtatttatattagcataaaacaacatgttgtgcataaatagttgaaatttactataaaaagactataatagactgtaccgaacaaacgttctgtgtttatttgtcggaataatagggcattacacttttatgaatgtttgtgttattacataaaacaaatatcaattcagtatcaagctaataagctttttcttgatttctgttgatacaattgagattgacacagatttaaaaaaatcaagtgatatctactaaaaaatttttttaaatttgttcaagtttttctaatttagtattggtgcctagttggaacgttttacgaacattcgattagaaaatggcactttaaatcatagtgtgtcttatgtataatgaaacacataatatagtgttggtgaaacgaaaaagacacaatatcttgtgttttgtatgcaaatgctttatttatgaagaaattacatttaaaagtaatttaacacagaaatttaatagttattatcaattaatagtcatatttttagaaaatgtactgagcaaatggaagatatccaatgatgtaaatactacatatagtgatttttatacattcaacccatataagctactattttctcaaatataaatctatgcaattggtttacatttgagaaaataagtagcttcattatagttaatacaatgctgagataaccatagtaaccatgttgttaaagcattttttaattggaatgactactttatttaaaagggttgaagaaagaaggtgatccaatgaaaataatatatttttcatttactggaaatgtccgtcgttttattaagagaacagaacttgaaaatacgcttgagattacagcagaaaattgtatggaaccagttcatgaaccgtttattatcgttactggcactattggatttggagaagtaccagaacccgttcaatcttttttagaagttaatcatcaatacatcagaggtgtggcagctagcggtaatcgaaattggggactaaatttcgcaaaagcgggtcgcacgatatcagaagagtataatgtccctttattaatgaagtttgagttacatggaaaaaacaaagacgttattgaatttaagaacaaggtgggtaattttaatgaaaaccatggaagagaaaaagtacaatcatattgaattaaataatgaggtcactaaacgaagagaagatggattctttagtttagaaaaagaccaagaagctttagtagcttatttagaagaagtaaaagacaaaacaatcttcttcgatactgaaatcgagcgtttacgttatttagtagacaacgatttttatttcaatgtgtttgatatttatagtgaagcggatctaattgaaatcactgattatgcaaaatcaatctcgtttaattttgcaagttatatgtcagctagtaaatttttcaaagattacgctttgaaaacaaatgataaaagtcaatacttagaagactataatcaacacgttgccattgttgctttatacctagcaaatggtaataaagcacaagctaaacaatttatttctgctatggttgaacaaagatatcaaccagcgacaccaacatttttaaacgcaggccgtgcgcgtcgtggtgagctagtgtcatgtttcttattagaagtggatgacagcttaaattcaattaactttattgattcaactgcaaaacaattaagtaaaattgggggcggcgttgcaattaacttatctaaattgcgtgcacgtggtgaagcaattaaaggaattaaaggcgtagcgaaaggcgttttacctattgctaagtcacttgaaggtggctttagctatgcagatcaacttggtcaacgccctggtgctggtgctgtgtacttaaatatcttccattatgatgtagaagaatttttagatactaaaaaagtaaatgcggatgaagatttacgtttatctacaatatcaactggtttaattgttccatctaaattcttcgatttagctaaagaaggtaaggacttttatatgtttgcacctcatacagttaaagaagaatatggtgtgacattagacgatatcgatttagaaaaatattatgatgacatggttgcaaacccaaatgttgagaaaaagaaaaagaatgcgcgtgaaatgttgaatttaattgcgcaaacacaattacaatcaggttatccatatttaatgtttaaagataatgctaacagagtgcatccgaattcaaacattggacaaattaaaatgagtaacttatgtacggaaattttccaactacaagaaacttcaattattaatgactatggtattgaagacgaaattaaacgtgatatttcttgtaacttgggctcattaaatattgttaatgtaatggaaagcggaaaattcagagattcagttcactctggtatggacgcattaactgttgtgagtgatgtagcaaatattcaaaatgcaccaggagttagaaaagctaacagtgaattacattcagttggtcttggtgtgatgaatttacacggttacctagcaaaaaataaaattggttatgagtcagaagaagcaaaagattttgcaaatatcttctttatgatgatgaatttctactcaatcgaacgttcaatggaaatcgctaaagagcgtggtatcaaatatcaagactttgaaaagtctgattatgctaatggcaaatatttcgagttctatacaactcaagaatttgaacctcaattcgaaaaagtacgtgaattattcgatggtatggctattcctacttctgaggattggaagaaactacaacaagatgttgaacaatatggtttatatcatgcatatagattagcaattgctccaacacaaagtatttcttatgttcaaaatgcaacaagttctgtaatgccaatcgttgaccaaattgaacgtcgtacttatggtaatgcggaaacattttaccctatgccattcttatcaccacaaacaatgtggtactacaaatcagcattcaatactgatcagatgaaattaatcgatttaattgcgacaattcaaacgcatattgaccaaggtatctcaacgatcctttatgttaattctgaaatttctacacgtgagttagcaagattatatgtatatgcgcactataaaggattaaaatcactttactatactagaaataaattattaagtgtagaagaatgtacaagttgttctatctaacaattaaatgttgaaaatgacaaacagctaatcatctggtctgaattagcagatgattagactgctatgtctgtatttgtcaattattgagtaacattacaggaggaaattatattcatgatagctgttaattggaacacacaagaagatatgacgaatatgttttggagacaaaatatatctcaaatgtgggttgaaacagaatttaaagtatcaaaagacattgcaagttggaagactttatctgaagctgaacaagacacatttaaaaaagcattagctggtttaacaggcttagatacacatcaagcagatgatggcatgcctttagttatgctacatacgactgacttaaggaaaaaagcagtttattcatttatggcgatgatggagcaaatacacgcgaaaagctattcacatattttcacaacactattaccatctagtgaaacaaactacctattagatgaatgggttttagaggaaccccatttaaaatataaatctgataaaattgttgctaattatcacaaactttggggtaaagaagcttcgatatacgaccaatatatggccagagttacgagtgtatttttagaaacattcttattcttctcaggtttctattatccactatatcttgctggtcaagggaaaatgacgacatcaggtgaaatcattcgtaaaattcttttagatgaatctattcatggtgtatttaccggtttagatgcacagcatttacgaaatgaactatctgaaagtgagaaacaaaaagcagatcaagaaatgtataaattgctaaatgacttgtatttaaatgaagagtcatacacaaaaatgttatacgatgatcttggaatcactgaagatgtgctaaactatgttaaatataatggaaacaaagcactttcaaacttaggctttgaaccttattttgaggaacgtgaatttaacccaatcattgagaatgccttagatacaacaactaaaaaccatgacttcttctcagtaaaaggtgatggttatgtattagcattaaacgtagaagcattacaagatgatgactttgtatttgacaacaaataacaattaaattaaaagaccttcacatgtaaagggaaatagcgattcgtttcgtcttgtctcctacatgttgaaggtcttttctctatgcttaaaagcgtatgcatattttgaaaaagtaaaaattgtatttaatgatgtcaatgaggctagaaagtatacaagatattgcattacaaaagggtgttctattttactttaagcaaacaaaatacacattccgaaaaattaaatttcagtttaattgcaaatatcaataaaattgacactaaattatttgaaaggctattgaaattatggtcaaaaaacgctactattaatgagaaatattatcaatgataatgattatcattaatttaaagggagaaaaatttgtaatgaagtatttattaaagggaaatattttgcttctattactaatattgttgacaattatttcgttgttcataggtgtgagtgaactatcaattaaagatttactacatttaactgaatcacagcggaatattttattctcaagccgaataccaaggacgatgagtattttaattgctggaagttcgttggctttagcaggcttgataatgcaacaaatgatgcaaaataagtttgttagtccgactacagctggaacgatggaatgggctaaactaggtattttaattgctttattgttctttccaaccggtcatattttattaaaactagtatttgctgttatttgcagtatttgcggtacgtttttatttgttaaaatcattgattttataaaagtgaaagatgtcatttttgtaccgcttttaggaattatgatgggtgggattgttgcaagtttcacaaccttcatctcattgcgcacgaatgctgttcaaagcattggtaactggcttaacgggaactttgccattatcacaagtggacgctatgaaattttatatttaagtattcctcttttagcattgacatatctttttgctaatcatttcacgattgtaggaatgggtaaagactttactaataatttaggtttgagttacgaaaaattaattaacatcgcattgtttattactgcaactattacagcattggtagtggtgactgttggaacattaccgttcttaggactagtaataccaaatattatttcaatttatcgaggtgatcatttgaaaaatgctatccctcatacgatgatgttaggtgccatctttgtattattttctgatatagttggcagaattgttgtttatccatatgaaataaatattggtttaacaataggtgtatttggaacaatcattttccttatcttgcttatgaaaggtaggaaaaattatgcgcaacaataataaaaaaataatgcttttaattgcagtaacgttattaattagtatgctgtacttatttgtaggtattgattttgaaatatttgaatatcaattttcaagtcgtttaagaaagttcatattaattattttagtaggtgctgccattgcaacttcagtggtgatttttcaagcgattacaaataaccgtctattgacaccatcaataatggggttagatgcagtttatttatttatcaaagtattgccagtctttttatttggaattcaatcggtatgggttactaatgtatatttgaactttatattaacacttataacgatggtgttattcgcactaatcctattccaaggtatctttaaaattggacatttttcaatttattttatcttacttattggtgtccttttaggaacattttttagaagcataacaggttttattcaactgattatggatcctgagtcatttttagcaatacaaagtagtatgtttgctaattttaatgcttctaattcgaatttagttactttctcagcagtgctattagtaatcttattagtcattacaattttactattgccttatttagatgtattgcttttaggtcgtgctgaagcaattaatcttgggatatcgtatgaaaaattaacgcgaattctacttgtaatagtctcagttttagtttctgtgtcaactgcattagtaggaccaattacatttttaggtttattaactgtaaatctagcgcatgaactaatgaagacgtatgaacataagtatattttaattgcgacaatttgcttgagttggattagtttatttagtgcgcaatgggtagttgaaaatgtgtttgaagctacgacagaaatgagtatacttattgatttgattggtggaagttatttcatttatctattagttagaaggagaaatgcgcaatgattcaagttgaaaatttaactaaaactataaataatcaaatgatattggaagatattagcatagatatcgaaaaaggtaaattgacttctttaattggacctaatggtgcgggtaagagtactttactttcagcgatatgtaggttaattcgttttgataacggtgaagtgaaaatagatggacagctcatgtctgattataaaaataatgacttgtcgaaaaaaatatctatattaaaacaaacaaaccatactgaaatgaatattacggtagagcagttggtaaactttggacgattcccttattctaaaggtcgtttgacgaaagaggatcatgatattgtcaatgatgcgctagatttgttgcaactacaagatatcagaaatcgtaatattaagtcattatctggtggacaacgtcagcgtgcatacattgcaatgacaatagcacaagatactgaatatattttgctagatgaaccattaaataatttagatatgaagcatgctgttcaaattatgcaaacgttaaaaatgttagcgcataaaatgaataaagcgattgtcattgtgttacatgatattaactttgcgtcctgttattcagatcagattgtagcattgaaaaacggacaactagttaagtcagatttgaaagataatgtcattcaaagtagtgttttaagtgatttatatgacatgaatattcaaattgaacatataagaaatcaaaggatttgtttatattttaaggattgataatttggagacactttaaaggggtgatgcgccaattaaagaagggttaaacgtaaagcatttatttatatttcacatcaagcacacagattaagccaaaagaggagaatattatattatgaagaaaacagtcttatatttagtattagcagtaatgtttttattagcggcatgcggtaacaattctgataaagaacaatcaaaatcagaaactaaaggttctaaagatacagtaaaaattgaaaataactataaaatgcgtggcgagaaaaaagatggtagtgacgctaaaaaagttaaagaaactgttgaagtaccaaaaaatcctaaaaatgcagttgtgttagactatggcgcattagatgtaatgaaagaaatgggcttatcagataaagtaaaagcattacctaaaggggaaggcggtaagtcattaccgaatttcttagaatcatttaaagatgataaatatacaaacgttggtaatttaaaagaagtgaattttgataaaattgctgcgacgaaacccgaagtaatctttatctctggacgtacagctaatcaaaagaatttagatgaattcaaaaaagctgcacctaaagcgaaaattgtttatgttggtgcagatgaaaagaacttaattggttcaatgaaacaaaacactgaaaatatcggtaaaatttacgataaagaagataaagctaaagaattaaataaagatttagataacaaaattgcttcaatgaaagataaaacgaaaaacttcaataaaactgttatgtatttactagttaacgaaggtgaattatcaacatttggacctaaaggtcgttttggtggattagtttacgatacattaggattcaatgcagttgataaaaaagtaagtaatagcaatcatggacaaaatgtttctaacgaatatgttaataaagaaaatccagatgttattttagcgatggatagaggtcaagcgataagtggtaaatcaactgcgaaacaagcattaaataatcctgtattaaaaaatgttaaagcaattaaagaagacaaagtatataatttagatcctaaattatggtactttgcagctggatcaactacaactacaattaaacaaattgaggaacttgataaagttgtaaaataattttaaaagaggggaacaatggttaaaggtcttaatcattgctcccctcttttctttaaaaaaggaaatctgggacgtcaatcaatgtcctagactctaaaatgttctgttgtcagtcgttggttgaatgaacatgtacttgtaacaagttcatttcaataccagtgggctccaaacatagagaaatttgattttcaatttctactgacaatgcaagttggcggggcccaaacatagagaatttcaaaaaggaattctacagaagtggtgctttatcatgtctgacccactccctataatgttttgactatgttgtttaaatttcaaaataaatatgatagtgatatttacagcgattgttaaaccgagattggcaatttggacaacgctctaccatcatatattcattgattgttaattcgtgtttgcatacaccgcataagattgctttttcgttaaatgaaggctcagaccaacgcttaatggcgtgcttttcaaactcattatggcacttatagcatggatagtatttattacaacatttaaatttaatagcaataatatcttcttcggtaaaataatggcgacagcgtgtttcagtatcgattaatgaaccataaactttaggcatagacaaagctccttaacttacgattcctttggatgttcaccaataatgcgaacttcacgatttaattcaatgccaaatttttctttgacggtcttttgtacataatgaataaggttttcataatctgtagcagttccattgtctacatttaccataaaaccagcgtgtttggttgaaacttcaacgccgccaatacggtgaccttgcaaattagaatcttgtatcaatttacctgcaaaatgaccaggcggtctttggaatacactaccacatgaaggatactctaaaggttgtttagattctctacgttctgttaaatcatccattttagcttgtatttcagtcattttaccaggagctaaagtaaatgcagcttctaatacaactaagtgttctttttgaataatgctattacgataatctaactctaattcttttgttgtaagtttaattaacgagccttgttcgtttacgcaaagcgcatagtctatacaatctttaacttcgccaccataagcgccagcattcatatacactgcaccaccaattgaacctggaataccacatgcaaattcaaggccagtaagtgcgtaatcacgagcaacacgtgagacatcaataattgcagcgccgctaccggctattatcgcatcatcagatacatcgatatgatctagtgataataaactaattacaatgccgcgaataccaccttcacggataataatatttgagccatttcctaaatatgtaacaggaatctcattttgataggcatatttaacaactgcttgtacttcttcatttttagtaggggtaatataaaagtcggcattaccacctgttttagtataagtgtatcgttttaaaggttcatcaactttaattttttcatttgggataagttgttgtaaagcttgatagatgtctttatttatcacttctcagtacatcctttctcatgtctttaatatcatatagtattataccaattttaaaattcatttgcgaaaattgaaaagaaagtattagaattagtataattataaaatacggcattattgtcgttataagtattttttacatagtttttcaaagtattgttgcttttgcatctcatattgtctaattgttaagctatgttgcaatatttggtgcttttttgtattgaattgcaaagcaatatcatcattagttgataagaggtaatcaagtgcaagataagattcaaatgtttgggtattcatttgaatgatatgtagacgcacctgttgttttagttcatgaaaattgttaaacttcgccatcataactttcttagtatatttatgatgcaaacgataaaaccctacataatttaagcgtttttcatctaaggatgtaatatcatgcaaattttctacacctactaaaatatctaaaattggctctgttgaatatttaaaatgatgcgtaccgccaatatgttttgtatattttactgggctgtctaagaggttgaataataatgattcaatttcagtgtattgtgattgaaaacaattagttaaatcactattaatgaatggttgaacatttgaatacatgataaactcctttgatattgaaaattaatttaatcacgataaagtctggaatactataacataattcattttcataataaacatgtttttgtataatgaatctgttaaggagtgcaatcatgaaaaaaattgttattatcgctgttttagcgattttatttgtagtaataagtgcttgtggtaataaagaaaaagaggcacaacatcaatttactaagcaatttaaagatgttgagcaaaaacaaaaagaattacaacatgtcatggataatatacatttgaaagaaattgatcatctaagtaaaactgatacaactgataaaaatagtaaagaatttaaggcactacaagaagatgttaaaaaccatctcatacctaaatttgaagcatattataagtcagcaaaaaatttgcctgatgatacaatgaaagttaagaaattaaaaaaagaatatatgacgcttgcaaatgagaagaaggatgcgatatatcaattaaaaaaattcataggtttatgtaatcaatctatcaagtataacgaagacattttagattatacgaaacaatttgaaaaaaatagatacaaagttgaatcagaaattaaattagctgataataaaagtgaagcaactaatcttacgacaaaattagaacataataataaagcgttaagagatactgcgaagaagaacctagatgatagtaaagaaaatgaagtaaaaggcgcgattaaaaatcacattatgccaatgattgaaaaacaaattaccgatattaaccaaactaatattagtgataagcatgttaataatgcaaggaaaaacgcaatagaaatgtattacagtctgcagaactattataatacacgtattgaaacaataaaggttagtgagaagttatcaaaagtcgatgtagataagttgccgaaaaagggtatagatataactcacggcgataaagcctttgaaaaaaagcttgaaaaattagaagaaaaataactataatcatttttcaaagttaaaaattttgaatttatggttaacatgtcaacttactatgtgtataatggtaaacattgatattaactatatgtataaaaatgtcacgcagatgctatttaaatgtgataaatatttttagaggtgaatagagtggctataaagctaagttcaattgaccaatttgaacaggttattgaggaaaataaatatgtttttgtattaaaacatagtgaaacttgtccaatatcggcaaatgcgtacgatcaatttaataaatttttatatgaacgcgatatggacggttattatttgattgtccaacaagaacgcgatttgtcagattatattgctaaaaaaacgaacgttaaacatgaatcacctcaagcattttattttgtaaatggtgaaatggtttggaatcgagaccacggtgatatcaatgtgtcgtcattagcacaagcagaagaataatgaaactataggttggaacattttgccttacactactagacgtgaatagcacaacttaaattcgtgtgaatcagagtagtttggctataatgatgttctgaccttttattttatgtcacctttagaagcagttaagttagtacttttttacaaacatatgtataatgtattcgagtatttttattgaaaatattttggaaaacgacgaatccaataagaaaatttaaacatgatttgtaagttagtttaataggaaatatatgataaaccaaaagaagcatactgttatttactggaataattaataatcatgtcatgttaaatgttcgcatataatcacgagataaaatctaaaatttaagattaatcttttatgaataaaaaacgtatcacaacaaataataaagtaaggtggtcaaggttatgaaagtattagtagccatggatgagtttcatggaattatttcgagttatcaagctaatagatatgttgaagaggcagttgcaagccaaattgaaactgcagatgtagttcaagtaccattgtttaatggaagacatgaattattagattctgtatttttatggcaatctgggcaaaagtatcgtataccagtacatgatgcagatatgaatgaagttgaaggtgtttacggacaaactgatacagggatgaccgttatcgaggggaatttatttttaaaaggtaaaaaaccaattgttgaacgaacaagttatggtttaggagaaatgattaaacatgcattagataatgacgcaaaacatgttgtaatttcactaggtgggattgatagttttgatgctggtgcaggtatgttacaagcattaggtgctcaattctatgatgacgaagggcgtgtcgtagatatgagacaaggtgctggtgtaattaaatatattcgtcgtatggatatgtcgaacttacaccctaaaatggaaacagcaagaattcaagtaatgtcggatttttcaagtcgattatatggtaagcaaagtgaaatcatgcaaacttatgatgcgcatcagttgcatcataatcaagcagcagaaatcgataatttaatttggtattttagtgagttatttaaaagtgaattgaaaattgcaattggtccagttgaacgtggtggtgctggtggtggaattgcagcagtcttgaatggactgtatcaagctgaaatattaaccagtcatgcattagtagaccaactaacacatttagaaaatttagttgaacaagcggatttaattatttttggagaaggattaaatgaaaatgatcagttgctagaaacgacaacattgcgtattgcagaactttgtcataaacatcaaaaggttgccattgcaatttgtgcaactgctgaaaagtttgatttatttgaatcacaaggggttacagcaatgtttaatacatttatcgatatgccagaaacttatactgactttaaaatgggattacaaattaggcattatacggttcagtctttaaaactgttgaaaacacattttaatgttgaggtttagtaaagaaggactaaattgatgatgctgtcatgatggttaataacatttatgatggttagcaaaacgaattagaagatcgaaagtatacgtaaaaaatatgaaaaatcacgctatcattgcactgaatgttagcgtgatttttttattaattaagcctgagttgaactagtatataatcgtttgtttttagtgattttcagcgatatcttctacaattccaatgattacttgtactgctttttccataacatcaatggatgcatattcatatgggccgtggaagttaccgcaacctgtaaagatgtttggagttggtaaccccataaatgacaattgtgaaccatctgtaccaccacgaataggttcagtgtttgctggaatatctaatttggcaaagacacgtttaggtatatcaataatatgaggcaatggtaatattttttctgccatattgaaatattgatccgatatatcaactttaactggataattttcaaaatgggcattgatatcgtcacgtatttctaaaatacgtttcttacgcaattcgaattgttttttatcatgatcacgaataatgtattgcaaagttgctttttcaacagttccttcaaagttcattaagtgataaaagccttcgtatccttctgttcgctccggaacttcactatcaggtagcaaactatcgaattgttcacctaaacgtattgcgtttaccattgcatttttagctgaaccaggatgaacatttacaccgtggcatgtaataaccgcttcagcagcgttaaagctttcatattgtaattctccatattgactaccatccatagtataagcaaaatcagcattgaagcggtcaacatcaaatttatgtggaccacgaccgatttcttcgtctggtgtaaatccaatgcgaatggtaccatgtttaatttctggatgttcttgtaaataacaaatagcttccataatttccacaatacccgctttatcgtctgcacctagtaacgatgtaccatcagttaccattaatgtatgaccaactaaactgttaagttctggaaatactttaggatctaagacacgtttagtattgcctagtttgtatggcttaccatcatagttttcaataatttgcggtttaacatttgaagcattgaaatcaggtgatgtatcaacatgcgccaaaaatccaactgttgggacgtcggcatcgatgttactttctaatgtagcaaataagtagccattttcatctaaatcagttggcaatcctaattgttgtaattctttttctaataaatgtaacaaatcccattgcttttcagttgaaggtgttgttgtagattttggatcagattgcgtatcaattgtcgtatatcttgttaatctatctatcaattggttcttcattatattcgaccccttaaactctattattcatgttgtaagattttttatatgtcttacctttgattttaccatacagttgtttgatacgtgtgtataggtaatatagaatttcagaaactaatataccgaaagcaatcgcacctgaaatcagtgtaacttctaaaaatgtatttacagcacttgtataatcattcgatactaaaaaacgagtcgcttgataagctgcaccaccaggtactaatggtataatgcctggtactatgaatataattaccggtcgtttatatctgcgactcatagtatgactcattaagcctaaaattaagcttcccaaaaatgaagcgccaacttttccaaactctaaatctaccgttaattggtaaatcgtccatgcaatggcacctacaaatccacatgctactaagaggcgtttgggtgcattgaaaatgatagagaaaagtactgttgatataaagctgattgtaaaatgaaataaataaaatagcatgctttaacagtccttccttaaatgattaataaaacgattgcgacaccagcaccgattgcgaatgctgttaatgcagcttcaacacctcgagacatacctgcaagtaattcacccgctaataaatctcgaatggcattggtaattaatataccagggacaagtggcatgacactggctatagtaatgatatcttgattggttgcaatgcctaatttagtaaatgtggctgcaatggatatgaccacagcagctgcaacaaactctgagaaaaatttaatttgtatatagcgttgcacaaagctgaatgttaaaaatgcggatccaccagcaatgactgcaatccaacaatctgatgcgacaccaccaaacataaataggaagaagccacatgcaatggcagctgcaaagaaattcgttaaaaaagaatattgtaatgatgcatgctgtaaatgaataaattcagatttagcttcatcaattgtgagttctttatttgatattttacgtgaaagactattcgttaaagcgattttctctaaatctgttgtacgctcttgtacacgaattaatcttgtacttgttcgatcgtttaatgaaaaaataattgcagttgaactgacaaaactatatgtattatgaagaccataactatgtgcgatacggttcattgtatcttcaactcgatatgtttcagcacctgattcaagtaaaattctacctgcaattaatacaacatcaatcactttgttttcatctataattgtgattgaatctggcatatcaattcacctccaatgatatgtgttatttatttgaacaattgaagtttacaacttgttgttacaactttcaatagtgagactttgtgttagtatgatgaacttgtatggttcaaatttaaataagaaaaactgttaatctttgctattatactatgatttaataatagcaaaggattaacagttttgtcgttgttataaattgataatagggttaaacattactttgtttcgcccttgatttttggctacatgcaccatatcgtctgcatctttaaacactttacgctgtgattttggatcgtcatctgttaaataaccaacaccgatagacactgacaatttaataacttctttgtttggtaaatggaatgatgatttttcaacacccgaacgaatattttcagctaatttaacactttgatcaagtgaataattgtgaatgacaactgagaactcttcgccaccatttctaaaaattttaaattgattcggcacatagtttttaagtaattgagacatttgttttaatacagcatcacctgatttgtgtgagtaggtatcattgacatctttaaatccatcgatatcgattaataataaagcgatactttgatgttctttttcagcttttcgtgaaatttcatttaaatgtctatcaaattcttttacattacctaagcctgttaagtaatcatatttatcttcgttttcataacgatttacgagtgagaagaaatgccaaatatcgacaaatgttatcgctgaagctaaagtgataattaatgaaattggtattaaaatgataacttccgatagtgtataaataggactcactaacgcgacaccaaataaaatgattattgtaacaacattaagtattaataatgatagcacatcattttgttttaaaaatggtccaatagcacttgttactgcagcaataacaatcaacgtaacaccgtacataatcgagttgttaaatactacaatttcaacaattgctacaattactgtggcagataatgtatagaccatatttgtaaatctacctaaaaacaataaaggaacgaatgttaagtgaattaaataatcttcacgataagggatagggtagacagataataataatgatacgattgtcattaaaacagtgacataagccttagaaaaaaccatacgtttgttttctgaatactgtaagcgatggaataaatagattccagcgactataacagatatattgtatataaatgcttcgaacatgtctgaatcgactcctttaattgaccactagctattgtaagtgaaaacttacaatttgtcattagtttacatataaaattaatgtatgatatagactttgatgttaaaatgttgccttaaatgatatgatgaaaaaatgaataataggcgatatataagaaatgaatcgtatagttgtaaatatgatatcattgattgagcgaattaatttataataaagctataagatatacgtagaaaatagatatatcattctataaagacaatattaaataaatataacgttaaaaacaattaatatcgatgaaggtgaataaatggttacattattactagttgcagtaacaatgattgtcagtttgacgataacaccaattgttattgcaatatcgaaaagattaaatttagttgataaaccaaattttagaaaagtacacactaaacctatttcagttatgggtggtacagtgattctcttttcatttttaataggtatttggattggtcatcctattgaaacagaaatcaaaccacttattattggtgcgattattatgtacgtacttgggcttgtagatgatatctacgatttgaaaccgtatataaaattggctggtcaaattgccgctgccttagtagttgctttttatggtgtgactattgattttatttcgttgccaatgggtacaacgattcattttggatttcttagtattccaattactgtgatttggattgttgctattacaaatgcaattaacttaattgatggactcgatggtttggcgtcgggtgtttctgcaatcggactcattacaataggattcattgcaattttacaagctaatattttcataacgatgatttgttgtgttttattaggctctttaattgggtttttattttacaatttccatcctgccaaaatatttttaggtgatagtggggctttaatgattggatttatcatcggattcctttctttactcggattcaaaaatattacaattattgcattgttcttcccaattgttatcttagcagttccattcattgatactttgttcgcaatgattcgacgtgtgaaaaaagggcagcatataatgcaagctgataaatcgcatttgcatcataaactattagctttaggctacacacatagacaaacagtattattaatctattcaatctctattttatttagtctttcgagcattattttgtatgtatcgccaccattaggtgttgtattaatgtttgtattaatcatatttagtattgaattaattgttgaatttacaggattaatagataacaactaccgaccaatattaaatttaattagtcggaaatcgtcacacaaagaagattagattttaaaacagtaagtaataaaataaaaaaatgatgtctgtacttttatgttgttataaaggaagacatactcacaaaaaacactagcatggaacgtgctttccaaattgcaaagtaacaatacgcaattagagttagccctcctaagctagtgtttttatttttattcagttggtatatcgaaaggtaactgctttggagtttcttcagtcaaatcgaaatttccagcagtcatttgatttaaaaagttaataaacgcttcatagtcacttttaacgacatcgatatagtagcttaccttatcagtgtaagtttggtttcttaacataaaatgagttgaagctaattcatattcaaatttaccagtttgatcataattcagtgttactatacatggtactgcttctcgtagttcgacacgcccgacatcataaatgacgtctctaacagcaccgctataggcgcgaattaaaccgccaccacctaatttaataccaccaaaatatcttgttactacgacacacgcattatgaacatcgagcttttttaatatgtctaacattgggacaccggcagttcctgtcggttcaccatcatcattcgctttttgaatattcatttcaggtccaatagtatatgcagaacaattatgagtggcatctttatgttctttttttattgcagcaataaatgctttagcttcatcttcattttgaacaggtttgatatgagcaatgaatcttgatttactaatcacattttcaataatgtgttcttttttaacagtaatgatattttgtgtcataataactccttaattcataagcttaagattatttaatcttcattatacactgaaaatgacatgactataaatcgtttgattgccattttctttttaactgaaatattgtatcattgctatgagtatattttaggaggacgactatgaaaattgctgtgatgaccgattctacaagttatctgtcgcaggacttaatcgataaatataatattcaaatagcgccattaagtgtgacttttgatgatggaaagaactttacagaaagtaatgaaatagcaattgaagaattttataataaaatggcatcgtctcaaacgattccgacaacaagccaaccagcaattggcgaatggattactaaatatgaaatgctaagagatcagggttacacagatatcattgtcatttgcttatccagtgggattagtggaagttatcaatctagttatcaagcaggggaaatggttgaaggtgttaatgtacatgcatttgatagtaagcttgcagcaatgattgaaggatgttatgtattacgtgctattgaaatggttgaagaaggatacgaaccacagcaaattattgatgatttaactaatatgcgtgagcacacaggtgcatatttaattgttgatgacttaaagaatttacaaaaaagtggtcgaattactggtgctcaagcatgggttggaacattattgaaaatgaagccagttcttaagtttgaagatggcaagattataccagaagaaaaagttcgtactaaaaagcgtgccattcaaacattagaaaagaaagtattagatattgtaaaagactttgaagaagtaactttatttgtcataaatggagatcattttgaagatggtcaagcgttatacaaaaagttacaagaagattgtccttcaggttatcaagtagcatactctgagtttggtccagttgttgcagcacatttaggttctggtggattaggtttaggctatgttggcagaaaaataagattaacataattataaaattttaataaaagagtctatattgtaattggaaattatctctcgtatacatggctttaaatgttcatcatttgaaagtcaaaatgctaaagatataagaaaatcattataatattaggctcttttttacgttgaaatgaggttttaagcattaaacattacgggaaattaattcatcctcatacttcacttactaatgaaaaaataaaaaaagaagtaacaggtgtcatcaaacaaaattcaaactattattgtgttcaatgtgaaagtacaaatccaaagcatttttatcagtatgattcctcagtacattccaagaaaattgtatattgcagaaattgtatatcactgggtcgaatggataatgtaacaagatataaaataacagagagttcgcaaagttcatcacaagcatattatcatctctcatttgaattgtcggaacagcagtcttatgcctcagaacatattgttcgagccattagaatgagacaaacgattttgttatatgccgtaacaggtgcaggtaagacagaaatgatgtttcaaggcattcaatatgcaagacgacagggagataatatagctattgtgtcaccgcgtgtagatgttgttgtagaaattagtaaacgtattaaagacgcatttcttaatgaagatatagacatactacaccagcaatcaagtcaacaatttgaagggcattttgttgtatgcacagtacatcaactttaccgattcaaacagcactttgatactatttttattgatgaagtcgatgcctttcctttatcaatggataaaagtttacaacaagcattgaagtcatcttctaaagttgaacatgcaacgatttatatgacagcaacaccaccgaaacaacttctgtcagagattccccacgaaaatataattaaattgccagctcgctttcataaaaaatcacttccagttcctaaatatcgttatttcaaacttaataataataagattcagaaaatgttataccgaattttacaagatcaaattaataatcaacgttatacactggtgttttttaacaatatagaaacaatgattaaaacattttcggtttataagcagaaaattactaaattaacatacgtccatagcgaggatgtttttcgctttgaaaaagttgaacaattaaggaatggacatttcgatgtcatttttactacgacaatattagaacgtggatttacaatggcaaatttggatgttgttgttatcgatgcacatcaatatactcaagaggctttaatacaaattgctggacgtgttggacgaaaattagaatgtcctgctggaaaagtattgttttttcatgaaggagtaagtatgaatatgattcaagctaaaaaagagattcaaaggatgaacaaattagcattaaaaagaggttggattgatgaataattgtttgagttgtggtgctaagttatatgaaaatataaccatttataatttgttcaagaaacctaatagattatgtgacagatgcaaagagaattgggacaatattaaacttgatattaaagcaaggcgatgttcaaggtgcttaaaacacttaaatcaagatgaagcgtattgtttagactgcaagtttctatcggcacactttaatttaatggaacaattatattgtcaatttcaatatgacggtttaatgaaagagatgatacatcagtataaatttttgaaagactattatttatgtgaattattggcacatttgattgaaataccacaaacatcttatgactatattgtgccaattccttcttcgccggcacatgatttatctagaacatttaacccggtagaagcagtactaaaagctaaagggattcgctttgataagattttaaagatgtcaaatagaccaaaacagtctcatttaactaagaaagagcgtctggcagatgaaaatccatttattattgatacggaattagatttaaatggcaaggaaatattactcgttgacgatatttatacaactggattaacaattcatcgtgcagggtgtaaattatatgctaaaaatatcagaaaattcaaagtgtttgcgtttgcacgatagcgtaaaaatgttaaaatataataaagagttaccaataaagaggtttaaggagagattactatgattagatttgaaattcatggagataacctcactatcacagatgctattcgcaactatattgaggaaaaaattggtaagttggaacgttattttaatgacgtaccaaatgcagtggcgcatgttaaagttaaaacttattcaaattcagctactaaaattgaagtaacaattccattgaaaaatgttacgttaagagctgaagagcgaaacgatgatttatacgcaggtattgatttaattaataataaacttgaaagacaagttcgaaaatataaaacacgtattaatcgtaagagccgtgatcgaggagatcaagaagtgtttgttgccgaattacaagaaatgcaagaaacacaagttgataatgacgcttacgatgataacgagatagaaattattcgttcaaaagaattcagcttaaaaccaatggattcagaagaagcggtattacaaatgaatctattaggtcatgacttctttgtattcacagacagagaaactgatggaacaagtatcgtttaccgacgtaaagacggtaaatatggcttgattcaaactagtgaacaataaattaagtttaaagcacttgtgtttttgcacaagtgcttttttatactccaaaagcaaattatgactatttcatagttcgataatgtaatttgttgaatgaaacatagtgactatgctaatgttaatggatgtatatatttgaatgttaagttaataatagtatgtcagtctattgtatagtccgagtcgaaaatcgtaaaatatttataatataatttattaggaagtataattgcgtattgagaatatatttattagtgataaacttgttgacaacagaatgtgaatgaagtatgtcataaatatatttatattgattccacaaatgagtaaataagtataattttctaactataaatgataagatatattgttgtaggccaaacagttttttagctaaaggagcgaacgaaatgggatttttatcaaaaattcttgatggcaataataaagaaattaaacagttaggtaaacttgctgataaagtaatcgctttagaagaaaaaacggcaattttaactgatgaagaaattcgtaataaaacgaaacaattccaaacagaattagctgacattgataatgtcaaaaagcaaaatgattatttagataaaattttaccagaagcatatgcacttgttagagaaggctctaaacgtgtattcaatatgacaccatataaagttcaaattatgggtggtattgcaattcataaaggtgatatcgctgagatgagaacaggtgaaggtaaaacattaacagcgacaatgccaacatacttaaatgcattagctggtagaggtgttcacgttattacagtcaatgaatacttatcaagtgttcaaagtgaagaaatggctgagttatataacttcttaggtttgactgtcggattaaacttaaacagtaagacgacagaagaaaaacgtgaagcatacgcacaagacattacttacagtactaataatgagctaggttttgattacttacgagataacatggtgaattattctgaagatagagtaatgcgtccattacattttgcaatcattgatgaggttgactcaattttaatcgacgaggcacgtacgccattaattatttctggtgaagctgaaaagtcaacgtcactttatacacaagcaaatgtttttgcgaaaatgttaaaacaggacgaagattataaatacgatgaaaaaacgaaagccgtacatttaacagaacaaggtgcggataaagctgaacgtatgttcaaagttgaaaacttatatgatgtacaaaatgttgatgttattagtcatatcaacacagctttacgtgcgcacgttacattacaacgtgacgtagactatatggttgttgatggcgaagtactaattgtcgatcaatttacaggacgtacaatgccaggccgtcgtttctcagaaggtttacaccaagctattgaagcgaaggaaggcgttcaaattcaaaatgaatctaaaactatggcgtctattacattccaaaactatttcagaatgtacaataaacttgcgggtatgacaggtacagctaaaactgaagaagaagaatttagaaatatttataacatgacagtaactcaaattccgacaaataaacctgtgcaacgtaacgataagtctgatttaatttacattagccaaaaaggtaaatttgatgcagtagtagaagatgttgttgaaaaacacaaggcagggcaaccagtgctattaggtactgttgcagttgagacttctgaatatatttcaaatttacttaaaaaacgtggtatccgtcatgatgtgttaaatgcgaaaaatcatgaacgtgaagctgaaattgttgcaggcgctggacaaaaaggtgccgttactattgccactaacatggctggtcgtggtacagatatcaaattaggtgaaggcgtagaggaattaggcggtttagcagtaataggtacagaacgacatgaatctcgtcgtattgatgaccagttacgtggtcgttctggacgtcaaggtgataaaggggatagtcgcttctatttatcattacaagatgaattaatgattcgttttggttctgaacgtttacagaaaatgatgagccgactaggtttagatgactctacaccaattgaatcaaaaatggtatcaagagctgtagaatcagcacaaaaacgtgtagaaggtaataacttcgacgcgcgtaaacgtatcttagaatacgatgaagtattacgtaaacaacgtgaaattatctataacgaaagaaatagtattattgatgaagaagacagctctcaagttgtagatgcaatgctacgttcaacgttacaacgtagtatcaattactatattaatacagcagatgacgagcctgaatatcaaccattcatcgactacattaatgacattttcttacaagaaggtgacattacagaggatgatatcaaaggtaaagatgctgaagatattttcgaagtcgtttgggctaagattgaagcagcatatcaaagtcaaaaagatatcttagaagaacaaatgaatgagtttgagcgtatgattttacttcgttctattgatagccattggactgatcatatcgacacaatggatcaattacgtcaaggtattcacttacgttcttatgcacagcaaaatccattacgtgactatcaaaatgaaggtcatgaattatttgatatcatgatgcaaaatatcgaagaagatacttgtaaattcattttaaaatctgtagtacaagttgaagataatattgaacgtgaaaaaacaacagagtttggtgaagcgaagcacgtttcagctgaagatggtaaagaaaaagtgaaaccgaaaccaatcgttaaaggcgatcaagttggtcgtaacgatgattgtccatgtggtagtggtaaaaaattcaaaaattgccatggaaaataaatgatataaaataactccttccaattaaacacctatagtttgtgttatgggaggagtctttttattttacaagcgttaaatactttaaaaaatgtgaagaagttgttaaacgttgttatgtacttagttttaaaaaatcggtttaggcatatgtcgatgataaatgtactgatttttaacaataaaagcataaactaattgtcagtgtgcttatatttcttaacattgttatttaacaaaattatgttaaaatttagcattataaaagatacaaatcaatgacttgaattgaaatttaaataggagcgaaggctatggaattatcagaaatcaaacgaaatatagataagtataatcaagatttaacacaaattagggggtctctttgacttagagaacaaagaaactaatatccaagaatatgaagaaatgatggcagaacctaatttttgggataaccaaacgaaagcgcaagatattatagataaaaataatgcgttaaaagcaatagttaatggttataaaacactacaagcagaagtagatgacatggatgctacttgggatttattacaagaagaatttgatgaagaaatgaaagaagacttagagcaagaggtcattaattttaaggctaaagtggatgaatacgaattgcaattattattagatgggcctcacgatgccaataacgcaattctagagttacatcctggtgcaggtggcacggagtctcaagattgggctaatatgctatttagaatgtatcaacgttattgtgagaagaaaggctttaaagttgaaactgttgattatctacctggggatgaagcggggattaaaagtgtaacattgctcatcaaagggcataatgcttatggttatttaaaagctgaaaaaggtgtacaccgactagtacgaatttctccatttgattcatcaggacgtcgtcatacatcatttgcatcatgcgacgttattccagattttaataatgatgaaatagagattgaaatcaatccggatgatattacagttgatacattcagagcttctggtgcaggtggtcagcatattaacaaaactgaatcggcaatacgaattacccaccacccctcaggtatagttgttaataaccaaaatgaacgttctcaaattaaaaaccgtgaagcagctatgaaaatgttaaagtctaaattatatcaattaaaattggaagagcaggcacgtgaaatggctgaaattcgtggcgaacaaaaagaaatcggctggggaagccaaattagatcatatgttttccatccatactcaatggtgaaagatcatcgtacgaacgaagaaacaggtaaggttgatgcagtgatggatggagacattggaccatttatcgaatcatatttaagacagacaatgtcgcacgattaatatatattttaaaaccgaggctctaaaagggcgtcggtttttggtttttttaaaggtagctaaataaattgtaaattagattttggaatatgatttgtttatgaatatttaagtacaattcggtagatagagttagaatatattttttaaaagttgtgtttgttaaaacaacatatgcagtgtgcatttagtaatattacctatggcgattttcaaggtattgaattaatcgttgaaaacgttctcaattacatggtatgaatacattttacactatgataaaaggttgtattctttttatattgttaaccatttgattacatcgttataacaatagcttttgacaaaatgtattgtgctatagtatttgcatacttaaaatactaacagcaaaggaatgacagcaagatgaaaaaaactcttacagtgacggtttcgtcagtgttagcttttttagctttaaataatgcagcacatgcacaacaacatggcacacaagtaaaaacacctgttcaacataactatgtatcaaatgttcaagcacaaacgcaatcaccgacaacttatacagtagttgctggcgattcattatataagattgctttagagcatcacttaacgttgaatcaattatattcatacaatcctggtgtaacacctttaatttttcctggtgacgtgatttcacttgtgcctcaaaataaagtgaaacaaactaaagcggttaaatcaccagtaagaaaagcaagccaagctaaaaaggtagtaaaacaacctgtacaacaagcgtctaaaaaagtagtagttaagcaagcacctaagcaagcagtagctaagacagttaatgtagcatataaacctgctcaagtacaaaaatcagtaccaactgtacctgttgcacataactacaataaatcagttgctaacagaggaaacttatatgcttatggaaactgcacatattatgccttcgatcgtcgtgcacaattaggtagaagtataggaagtttatggggcaatgcaaataactggaattacgcagcaaaagttgcaggatttaaagtagataaaacaccagaagttggcgctattttccaaacagctgctggcccatatggacatgttggtgttgttgaatctgtaaaccctaatggaacaattactgtttcggaaatgaactatgctggatttaatgttaaatcttcaagaacaattttaaatccaggaaaatataattacatccactaagtaatatatcaagacaagactatcctcttagcctgtttaagtaacaggttgagaggattttttggtatcatttaatcagagttatataaagaagatatttaaatgatatttaattgattgatatgtaaaaagaaagtataatttatgattaattaatggaggaggtaattgaaatgggtgtacatcaatattttaaaagattatcagatatggaaagacttataagattacctggaaaatttaaatattttgaacacaatgttgcagcacactcctttaaagtaactaaaattgctcaatatctagcaacagttgaagaatatcatggtcgaaagattaattggaaaagcttatatgaaaaagcattaaatcatgatttcgctgaagtgtttactggtgatataaaaacacctgttaaatatgcgagtagtgaattaaaaaaattattttcgcaagttgaagaagaaatggtagagacctttattgaagaagaaattccattacaatatagagatgtttataagcaacgactgcaagaaggtaaagatgattcattagaaggccaaatactttcagttgctgataaaattgatttgctttatgaaacatttggagaaatacaaaaacgtaatcccgaagaattatttttcgaaatttatgaaatgagtctagaaacaattattcaatttgaccatttagcatctgtacaagattttattaataatatcattccagaaatgttgactgaaaactttatacctagaacagaattaagagaaacaaccatgaacattttaaataaaagaaaagaggaaaatgaatgatatggtattttagcgcagcattctttccatgtgtcttggtagtattatttagtgtaataacaagaagtaaatgggtcggtactattctgacattaattttaattggtgcctcaatctataaagagtatttccataacgagtggattatttttattgatgtagtgtcattattagctggttatttaattatagatcaactcgaatttcataaacatcaagatgaagatcgctaagattaactttaaaataatgtttcaaacaaatttgttgaaacaaaacgatgattaatataatgtgtatttacatactaaaaataacaagataaacgatttgatttaaggcaagcatagttagcacaactatgtttgtttttctttgttcgacatttttacgaacaaacgtttgctttttgtgtggctactttgctaaaatatgtaatgagaaagcgaagagttgagcggaaatataaataatacgttgaaagaggaggcatatgtgacaatggttgaacattatccttttaaaatacattctgattttgagcctcaaggtgaccaaccgcaagcaattaaggaaatcgtggatggtattaaagcggggaaaagacatcaaactttattaggtgcaactggcacagggaaaacatttacgatgagtaatgttattaaagaagttgggaaaccaacgttaattatcgcacataacaaaacattagcagggcaattatatagtgagtttaaagaattttttcctgaaaacagggtggaatactttgtaagttactatgattattatcaacctgaggcatacgtaccgtctactgacacttttattgaaaaagatgcctcaatcaatgatgaaattgatcaactacgacattctgctacaagtgcattatttgaacgcgatgatgtaattattattgctagtgtaagttgtatatatggtttaggtaatcctgaagaatataaagatttagtagtaagtgttcgagttggtatggaaatggatagaagtgaattacttagaaaacttgtagatgtgcaatatacacgaaatgacatcgatttccaacgaggaacgtttcgagtgcgtggtgatgtagttgaaatattcccagcctctaaagaagaactttgtataagggttgagtttttcggcgatgagattgaccgtatccgagaagttaactacctaacaggtgaagtgttgaaagaaagagaacattttgcgatattcccagcttctcacttcgtaacacgtgaagaaaagttgaaagttgcgattgaacgtattgaaaaagaattggaagaacgattgaaagaattacgagatgagaataaattactagaagcgcaaaggttagaacagcgtaccaactatgatttagaaatgatgcgagagatgggattctgttcaggaattgaaaactattccgtacatttaactttgcgaccactgggttcgacaccgtatactttattggattactttggcgatgattggttagtaatgattgatgaatcacatgtgacattaccacaagttcgaggcatgtataacggagacagagcgcgtaaacaagttttggtggatcatggatttagattaccgagtgcattagataaccgtccacttaaatttgaagaatttgaagaaaagacaaaacaacttgtgtatgtatctgcaacgcctggaccatacgaaattgaacatacggataagatggttgaacaaattattcgtcctactggtttactggatcctaaaattgaggttagacctactgaaaatcaaattgacgatttattaagtgaaattcaaacaagggttgagcgtaatgaacgcgtacttgttacaacgctcactaaaaagatgagtgaagatttaaccacatacatgaaagaagcgggtattaaagttaattatctgcattcagaaatcaagacattagaacgaatcgaaataattagagacttacgaatgggtacatatgatgttatcgtaggtattaatttattaagagagggtattgatataccagaagtttctctagttgtcatattagatgcagataaagaaggatttttacgttctaaccgctcattaattcaaacaataggtagagctgcgcgtaacgataaaggtgaagtcattatgtatgccgataaaatgactgattcgatgaagtatgcaattgatgagacacaacgtcgtcgagaaatacagatgaaacataatgaaaaacatggtattacacctaaaacaattaataaaaaaatacatgatttaattagtgctactgttgaaaatgacgaaaataatgacaaagcacaaactgtgatacctaagaagatgacgaaaaaagaacgtcaaaagacaatcgacaatatagaaaaagaaatgaaacaagcagcgaaagatttagatttcgagaaagctacagaattaagagatatgttatttgaattaaaagcagaagggtgacaagtaaatgaaagaaccatccatagtagtaaaaggtgctcgtgcgcataacttgaaagatattgatatcgaactacctaaaaataaattaattgttatgacaggtttatctgggtcaggtaaatcgtcattagcattcgatactatatatgctgaaggacaacgacgttatgttgaatcattaagtgcctatgcgcgtcaatttttaggccaaatggacaaaccagatgttgatacaattgaaggattatcgccagcaatttcaatagatcaaaaaacaacaagtaaaaatccaagatcaactgtagcaacagtaacagaaatatatgattatatacgtttgttatatgcacgtgttggtaaaccttactgtccaaatcacaatatagaaattgaatcgcaaacagtacaacaaatggttgaccgcattatggaattagaggcacgtacaaagattcaattattagcacctgtcatcgctcatcgtaaaggtagtcatgaaaagctaatcgaagatattggtaaaaaaggttatgtacgtttaagaatcgatggcgaaattgttgatgtaaatgatgtacctactttagataagaacaagaatcatacaatagaagttgttgtagaccgattagttgttaaagatggaattgaaacacgactagctgactctatagaaactgcgttagagctttcagaaggacaattaacagttgatgtcattgacggggaagaccttaagttttcagaaagccatgcttgtcctatatgtggattttcaatcggagagttagaaccaagaatgtttagctttaacagtccttttggtgcttgtccgacatgtgatggcttaggccaaaagttaacagtcgatgtagacttggttgttcccgacaaagataagacgctaaacgaaggtgcaatagaaccttggataccgacgagttctgatttttatccaacattgttaaaacgtgtttgtgaagtttataaaatcaatatggataaaccttttaaaaagttaacagaacgtcaacgtgatattttattgtatggttctggtgacaaagaaattgaatttacatttacacaacgtcaaggtggtactagaaaacgaacaatggttttcgagggtgtagttcctaatataagtagacgattccatgaatctccttcagaatatacacgtgaaatgatgagtaaatatatgaccgaactaccttgtgaaacttgtcatggaaagcgattgagtcgtgaagcgttatctgtttatgtaggtggtttaaatattggtgaagtagtcgaatattcaatcagtcaagcgctgaactattataaaaacattgatttgtcagaacaagatcaagcgattgcaaatcaaatattgaaagaaattatttcccgactcacttttttaaataatgtgggacttgaatatttaacgctaaacagagcttcaggtacactttcaggtggtgaagcacaacgtattcgattggcaacgcaaattgggtcgcgtttgactggtgtcttatatgtattagatgagccatcaattggactgcatcaaagagataatgatcgattaattaatacacttaaagaaatgagagatttaggaaatactttaattgtagttgaacacgatgatgatacaatgcgtgcggctgattacttagtggatatagggcctggtgctggtgaacatggaggacaaattgtgtctagtgggacacctcaaaaggtaatgaaagataaaaaatcattaacaggacaatacttgagtggtaagaaacgtattgacgtacctgaatatcgcagaccggcttcagatcgtaaaatttctatacgtggagctagaagcaacaatcttaaagggattgatgtggacataccactatcaatcatgacggttgttacaggtgtatcaggttctggtaaaagctcattagtaaatgaagtattatacaaatcattagctcaaaaaattaataaatctaaagtaaagccaggattgtacgataagattgaaggtattgatcaacttgataaaattattgatattgatcaatcaccgataggtagaacgccacgctctaatccagcaacatatactggtgtgtttgatgatatacgtgatgtgtttgcgcaaacaaatgaagctaaaattcgaggatatcaaaaagggcgttttagttttaatgtaaaaggtggacgctgtgaagcttgtaaaggtgacggtattattaaaattgaaatgcattttttacctgatgtttatgttccttgtgaagtgtgtgatggtaaacgatataatcgtgagacactagaggttacttacaaaggtaaaaatattgctgacattttagaaatgactgttgaagaagcaacacaattttttgaaaatattcctaagattaagcgcaagttacaaacactagttgatgttggtcttggatacgtcacattaggtcaacaagctacaacgttatcaggtggtgaggctcaacgtgtgaaacttgcatctgaacttcataaacgttcaactggtaaatctatttatatcctagacgaaccaacaacagggttacatgttgacgatattagcagattattaaaagtattaaatcgattagttgaaaatggtgacactgttgtaattattgaacataacctagatgttatcaaaacagcagactatattatcgacttaggtcctgaaggtggtagtggcggtggtactattgttgcgactggcacacccgaagatattgctcagacaaagtcatcatatacaggaaagtatttaaaagaagtacttgaacgagataaacaaaatactgaagataaataagattaaaagaagtgaagggtgttgtaaatttacccttcacttctttttattaatttagtaatgaatagtagaaagaaaagatgcgtaaaaagaattatgttaagatagggtcaatctagagttgctaaacataaatcgaaactgagagtgggacagaaatgataaagaatcactaatgatttattatgtagtggttctttgtcattagccacagctattgtgtacttaaaaataggaatgcatgagtgcaactcatgcataagaaatactaatttctaaagaaaaagtatttctttatgttggggcccaccccaacttgcattgtttgtagaatttcttttcgaaattctctgtgttggggccccgccaacttgcattgcctgtagaatttcttttcgaaattctttatgttggggccccgccaactaattacaatatatcattgtagagcttaggtcattgatttatggctcggacttttatggcgatatgaaccatgtaaattaagcaagcaataaattaatgattgatattgacttgtaaaataataacaataatgaacaattaatatttattttagcttttcaatgtagattggtgttatatttttgatatgataagaagagatgtaagagtagggataaatacaattgaggtgaacccatgttaacgacagaaaaactagttgaaacattaaagttagatttaatcgctggtgaagaaggactatcgaagccaattaaaaatgctgatatatcaagaccaggcttagagatggcaggttatttttcacattatgcgtcagatagaatacaactattaggaacaacggaactatcgttttacaatttattaccagataaggatcgcgcaggtcgtatgcgtaaactatgcagaccagaaacgcctgcaattattgtgacacgtggattgcagccaccagaagaattagttgaagctgcaaaagaattaaataccccacttatagttgctaaagatgcgactacaagtttaatgagtcgcttaacaacgtttttagagcatgcacttgcaaagacgacatctttacatggtgttttagtagatgtttacggtgttggtgtactaattaccggtgattcaggaataggtaaaagtgagactgcgttggaattagttaaacgtgggcatagattagtagcagatgataatgtagaaatacgtcaaattaataaagatgaactaatagggaaaccaccaaagttaatagaacatctattagaaatacgtggactaggtattatcaatgttatgactttatttggcgcgggttcaatattaactgaaaaacgaattagattaaatattaatttggaaaactggaacaagcaaaagttatatgaccgcgtaggtcttaatgaagagacgctaagtattttagatactgaaatcactaaaaaaacaatacctgtaagacctggtagaaatgttgcggtaattattgaggtcgctgcaatgaactatcgattaaatatcatgggcattaacactgccgaagaatttagtgaaagattaaatgaagaaattatcaagaacagtcataagagtgaggagtaggttgaatgggtattgtatttaactatatagatcctgtggcatttaacttaggaccactgagtgtacgatggtatggaattatcattgctgtcggaatattacttggttactttgttgcacaacgtgcactagttaaagcaggattacataaagatactttagtagatattattttttatagtgcactatttggatttatcgcggcacgaatctattttgtgattttccaatggccatattacgcggaaaatccaagtgaaattattaaaatatggcatggtggaatagcaatacatggtggtttaataggtggctttattgctggtgttattgtatgtaaagtgaaaaatttaaacccatttcaaattggtgatatcgttgcgccaagtataattttagcgcaaggaattggacgctggggtaactttatgaatcacgaggcacatggtggaccggtgtcacgcgcttttttagaacaattacatttgcctaattttataatagaaaatatgtatattaacggccaatattatcatccaacattcttatatgaatccatttgggatgtcgctggatttattatcttagttaatattcgtaaacatttaaaattaggagaaacattctttttatatttaacttggtattcaattggtcgattctttatagaaggattacgtacagatagcttaatgctcacaagtaatattagagttgcacaattagtatcaattcttttaattttaataagtataagtttaattgtatatagaaggattaagtataatccaccgttgtatagcaaagttggggcgcttccatggccaacaaaaaaagtgaagtagtgatattttgagaaaatttttatcaaaaacacatcatcatacaaaccctttatggcgtgtataccgtcttgttaaattttcgaaagtttttaagaatgtaattatcattgaattttcgaaatttattccaagtatggtactgaaaagacatatatataaacaacttttaaatattaatatcggtaatcaatcatcgatagcttataaagtaatgttagatattttttacccagaactgattacgattggtagtaacagtgttattggttacaatgtaacaattttgacgcatgaagcattagttgatgaatttcgttatggaccagtgacgataggatctaacactttgattggtgcaaatgctaccattttacccggtataacgattggtgacaatgtaaaagttgcagctggtacggttgtttcaaaagatataccggataatggatttgcatatggcaaccctatgtatataaaaatgattaggaggtgacaattttatggcgcaaaagaataataatgtaattccaatgacttttgatgatgcattttatcgtaaaatggctaaacagaagtttaaacaaagagaatataaacgagctgctgaatactttgaaaaagtgttagaattgtcacctgatgatctggaaattcaaattgattatgcacaatgtctagtgcaacttggtattgctaaaaaagcagaacatttattttatgacaatattatttataataggcatctagaagatagcttttatgaattgagtcagctcaacattgaagttaacgaaccaaacaaggcattcttgtttggtattaattatgttattgttagcgacgaccaagattatagagatgaattagatcaaatgtttgatgtgaaatatcaaagcgaagaacaaattgaacttgaagctcaattgtttgtagttcaaatactattccaatatcttttttctcaaggtcgattaaaagatgcaaagaattatgtcttacatcaaccacaagaagttcaagatcatcgtgtcgtacgtaatttattggcaatgtgttatttatatctcggtgaatatgatacggctaaagcattgtacgaagcactattacaagaggatagtacagatatatatgcattatgccattatactttgctactttataacactaaggaaaatgaacaatatcaaaaatatttaaaaatattaaacaaagttgtacctatgaatgacgatgaaagttttaaattaggtattgtattaagttatttaaagcagtatcgtgcatcacaacaattgttgtaccctttatataaaaaagggaaatttttatcaattcaaatgtacaatgctttagcatataattattattatttaggtgaagaagacgaaagtcattactactgggataaattgaagcaaatttctaaagtggaaattggacatgcgccttgggtaattgaaaatagcaaagaagtttttgaccaacatattttgccattacttcaaagtgatgacagtcattatcgtttatatggtatttttttattggatcaattaaatggtaaagaaattgtgatgacggaaagtatttggcaggttctggaaaatctaaataattatgagaaattgtatttaacgtatttagttcaaggtttaacgctcaataaattagacttcattcatcgcggcttgttaacgctttaccaaaatgaattatttgtaagtgaaaatgatttaatggttgcatggattaatcaaggtgaactcataattgctgaaaaagtagatttaactgatgttgagccatatatcggtgcgtttatttatttgtattttaaaaatcaacctcgaaacgttacaaagaagcaaattacaacatggttaggcataacacaatataaactgaacaaaatgattgaatttctcttgagcatatagatttatgaaaagttagatttattatataatgcgcataatgattaataatgaggaggcgttaataaaatgactgaaatagattttgatatagcaattatcggtgcaggtccagctggtatgactgctgcagtatacgcatcacgtgctaatttaaaaacagttatgattgaaagaggtattccaggcggtcaaatggctaatacagaagaagtagagaacttccctggtttcgaaatgattacaggtccagatttatctacaaaaatgtttgaacacgctaaaaagtttggtgcagtttatcaatatggagatattaaatctgtagaagataaaggcgaatataaagtgattaactttggtaataaagaattaacagcgaaagcggtcattattgctacaggtgcagaatacaagaaaattggtgttccgggtgaacaagaacttggtggacgcggtgtaagttattgtgcagtatgtgatggtgcattctttaaaaataaacgcctattcgttatcggtggtggtgactcagcagtagaagagggaacattcttaactaaatttgctgacaaagtaacaatcgttcaccgtcgtgatgagttacgtgcacagcgtattttacaagatagagcattcaaaaatgataaaatcgactttatttggagtcatactttgaaatcaattaatgaaaaagacggcaaagtgggttctgtgacattaacgtctacaaaagatggttcagaagaaacacacgaggctgatggtgtattcatctatattggtatgaaaccattaacagcgccatttaaagacttaggtattacgaatgatgttggttatattgtgacaaaagatgatatgacaacatcagtaccaggtatttttgcagcaggagatgttcgtgacaaaggtttacgccaaattgtcactgctactggcgatggtagtattgcagcgcaaagtgcagcggaatatattgaacatttaaacgatcaagcttaattcgaggtcgaattaagatgttgagttgtaagttatttggatatttattttaatagtgtcatcaccttgttaaaataatgtcttacttttaaattaaagcaaattatatagaaaactagaacttagtacgtatcatttgtgcgtttcaatgagttctagttttttttatatgttatattaaacttataactttatgggagtgggacagaaatgataaagagccactaatgatttattatgtagtggttcttatacattagccacagctaatgtgtacttaaaaataggaatacatgagtaaaactcatgcataagaaatactaatttctatagaaaaagtattactttatcgttgtaccaccccaacttgcacattatcgtaagctgacttatcgtaagcttctgtgttggggcccacaccccaactcgcattgcctgtagaatttcttttcgaaattctctttgttggggcccacaccccaacttgcattgtctgtagaaattggaaatccaatttctctgtgttggggcccacaccccaactcgcattgcctgtagaatttcttttcgaaattctctgtgttggggcccacaccccaacttgcattgtctgtagaaattggaaatccaatttctctgtgttggggcccctgactagagttgaaaaaagcttgttgcaagcgcattttcattcagtcaactactagcaatataatattatagaccctaggacattgatttatgtcccaagctcctttaaatgatgtatatttttagaaatttaatctagacatagttggaaataaatataaaacatcgttgcttaattttgtcatagaacatttaaattaacatcatgaaattcgttttggcggtgaaaaaataatggataataatgaaaaagaaaaaagtaaaagtgaactattagttgtaacaggtttatctggagcaggtaaatctttggttattcaatgtttagaagacatgggatatttttgtgtagataatctaccaccagtgttattgcctaaatttgtagagttgatggaacaaggaaatccatccttaagaaaagtggcaattgcaattgatttaagaggtaaggaactatttaattcattagttgcagtagtggataaagttaaaagtgaaagtgacgtcatcattgatgttatgtttttagaagcaagtactgaaaaattaatttcaagatataaagaaacgcgtcgtgcacatcctttgatggaacaaggtaaaagatccttaattaatgcaattaatgatgagcgagagcatttgtctcaaattagaagtatagctaattttgttatagatactacaaagttatcacctaaagaattaaaagaacgcattcgtcgatactatgaagatgaagagtttgaaacttttacaattaatgtcacaagtttcggttttaaacatggaattcagatggatgcagatttagtatttgatgtacgatttttaccaaatccatattatgtagtagatttaagacctttaacaggattagataaagacgtttataattatgttatgaaatggaaagagacggagattttctttgaaaaattaactgatttgttagattttatgatacccgggtataaaaaagaagggaaatctcaattagtaattgccatcggttgtacgggtggacaacatcgatctgtagcattagcagaacgactaggtaattatctaaatgaagtatttgaatataatgtttatgtgcatcatagggacgcacatattgaaagtggcgagaaaaaatgagacaaataaaagttgtacttatcggtggtggcactggcttatcagttatggctaggggattaagagaattcccaattgatattacggcgattgtaacagttgctgataatggtgggagtacagggaaaatcagagatgaaatggatataccagcaccaggagacatcagaaatgtgattgcagctttaagtgattctgagtcagttttaagccaactttttcagtatcgctttgaagaaaatcaaattagcggtcactcattaggtaatttattaatcgcaggtatgactaatattacgaatgatttcggacatgccattaaagcattaagtaaaattttaaatattaaaggtagagtcattccatctacaaatacaagtgtgcaattaaatgctgttatggaagatggagaaattgtttttggagaaacaaatattcctaaaaaacataaaaaaattgatcgtgtgtttttagaacctaacgatgtgcaaccaatggaagaagcaatcgatgctttaagggaagcagatttaatcgttcttggaccagggtcattatatacgagcgttatttctaacttatgtgtcaatggtatttcagatgcgttaattcattctgatgcgcctaagctatatgtttctaatgtgatgacgcaacctggggaaacagatggttatagcgtgaaagatcatatcgatgcgattcatagacaagctggacaaccgtttattgattatgtcatttgtagtacacaaactttcaatgctcaagttttgaaaaaatatgaagaaaaacattctaaaccagttgaagttaataaggctgaacttgaaaaagaaagcataaatgtaaaaacatcttcaaatttagttgaaatttctgaaaatcatttagtaagacataatactaaagtgttatcgacaatgatttatgatatagctttagaattaattagtactattcctttcgtaccaagtgataaacgtaaataatatagaacgtaatcatattatgatatgataatagagctgtgtaaaaaaatgaaaatagacagtggttctaaggtgaatcatgttttaaataaggaaggaatgactgtacgatgagctttgcatcagaaatgaaaaatgaattaactagaatagacgtcgatgaaatgaatgcaaaagcagagctcagtgcgctgattcgaatgaatggtgcacttagtctttcaaatcaacaatttgttataaatgttcaaacggaaaatgcaacaacggcaagacgtatttattcgttgattaaacgtgtctttaatgtggaagttgaaatattagtccgtaaaaaaatgaagcttaaaaaaaataatatttatatttgtcgtacaaagatgaaagcgaaagaaattcttgatgaattaggaattttaaaagacggcatttttacgcatgaaattgatcattcaatgattcaagatgatgaaatgagacgcagttacttgagaggagcttttctggcaggtggctcagtgaataaccctgaaacatcttcgtaccatttggaaattttttctcaaaatgagagtcatgcagaaggcttaacgaaactaatgaatagttatgagttgaatgccaaacatttagagcgaaaaaaaggaagtattacgtatttaaaagaagcggaaaagatttcggattttcttagtttgataggtggctatcaagcgttattaaaatttgaagacgtacgtattgtaagagatatgcgtaattctgttaaccgactcgttaattgtgaaacggcaaatctaaataaaacagttagtgctgcgatgaaacaagttgagagcattaaattgattgataaagaaattggtattgaaaatttaccagacaggttgagagagattgctagaattcgagtagaacatcaagaaatttcgttgaaagagcttggagaaatggtatcaactggtccaatttcaaaatcaggtgtaaatcaccgattaagaaaacttaatgatttagccgataagattagaaatggtgaacaaatagaattataagtaagaaggtgtttttggtagtgaattatcaaaaataccttttttatgattaaaaagtgtttaatgaataatagtcgactaactattaaattgagctggaaagtttaatgaaggaaattcaataaccaagcgttacctaattttctcattaagtagcatcatatgtatcaatttggtcataagaaaatatgaatgtgataattaattgagtcactgatcatagacaaaaacaaaatcagcataaataagaatcccgactttgcgggattctctgtattgaaaagtattgtattttattaaaacagcctccttgaagggaattgaacccctatcttaagaaccggaatcttacgtgttatccattacaccacaaggagcaaatatgtaatcatatctctgtactatgagaagtaaaataagtacaatctaaaatagatattatcagtttacaaaggaaagagaaaagcgtcaaacaatgtaactatttaaagtcaaagtgtttgaccaaatttgacttaatatgtaaaataatgagtaacagttattacaaggaggaaatatagatgaatttaattcctacagttattgaaacaacaaaccgcggtgaacgtgcatatgatatatactcacgtttattaaaagaccgtattattatgttaggttcacaaattgatgacaacgtagcaaattcaatcgtatcacagttattattcttacaagcgcaagactcagagaaagatatttatttatacattaattcaccaggtggaagtgtaacagctggttttgcgatttatgatacaattcaacacattaaacctgatgttcaaacaatttgtatcggtatggctgcatcaatgggatcattcttattagcagctggtgcaaaaggtaaacgtttcgcgttaccaaatgcagaagtaatgattcaccaaccattaggtggtgctcaaggacaagcaactgaaatcgaaattgctgcaaatcacattttaaaaacacgtgaaaaattaaaccgcattttatcagagcgtactggtcaaagtattgaaaaaatacaaaaagacacagatcgtgataacttcttaactgcagaagaagctaaagaatatggcttaattgatgaagtgatggtacctgaaacaaaataattcaaagtaaagagtagactaagcagtctgctctttttgtatgagtaaaccgaggtgtcaataaattgtttactatactttgagcggaaatatgattgaatgaagctagttgaaccgtaactatatgaaatgttcccttcaaagtagacattgaaaggaacatttcaatcctttgtttgtaagtcgctctagacattacatttagtacatatgttgtttctaatgctcattaatggtattgattattctttgattaaatcttcaagtgccatttttaaattactatatttaaattggaatcccaatgcttgaattttattaggtaatactttttgagtatccaatactactgttgacatttgaccaagtatgagacgcattgcaagacttggtgcccaagtttcatggggcttatgcatagctcttgctaaagtgtagccaaataaattttgacgctcaggtataggtgcagttaaattaaacggaccactagctgactcgttatttattaaaaataaaatagcttgaattaaatcattgatatgaatccatgaataccattgttgaccagaacctaatttaccaccaatgtaatatttgtatggtagtttcattgtttgtaacgcaccgccttcattcgataaaatcataccgaaacgaccgatgacaactcgcgtacctaattgttcaaattgttgtgcgaaacgttcccattgatacacaatatctgataagaaatcaaatggtaaagttttataaacttctgtgtaactcataaataaatcaggaggatagtaaccagtggcgctagcattaaataaaactttaggtgctttattacgtgatttaaacaattcatataaagcttgcgtagattgaattctacttagcattagcgtttgtttatattccggtgtccatcgtttattcagtgtagcacctgctaagttgatgaccacatcgatattttgaggaactttgtgttcccacccagatttagcccagttgacatatgaaattttcttatcatttgaaatttggtcgtgtcgcgttaatatcgtgatatgtgaatctgattttttaatttcattaactaattgagatccaaccataccagtcccaccagtaattaagtattgtttcattatcattcaccccatgtaattttgtatttagttactatttaataatcattattgttgttcaaaggttatacattatttagacaataatatgtcaataactttttttgaattgtattttaataaaaatgatataagttataataaaggtgtaccttcgataacgaataaacatctcttaaaagtatgtgtaaaacgctgcatgatacaaacgaaggtaaaaatttgactccctttagtagtggacccgtacgttaatcgtgcgggtcgtttttatttatttcttattcccattatacatcaatttaaagcattaattttttaaacaaatttaagaatacatagtaatataacaatctaaacataaaaacttttaacacaacacttaaaccaatgctttaattttcaatacgtagctataatttgttgtaaaatcaaaaaggttaaaatgttaattttcaaaaaaaggctcaaaatatgtttgatttagttattaaatgttaagatatataagactactatttctttgtaaaaatgaatccgatttacgagtgagtaatagtgaaggcagttttaagttgaagaaggcaaaaagagtaaatgtttattaatatttgtagaaactaggtaagcaaattagttgtgaaaatgttaatggttgcgtgataatttctatatttaaattagtttgaagtgagggagagtatgtcgaatcaaaattacgactacaataaaaatgaagatggaagtaagaagaaaatgagtacaacagcgaaagtagttagcattgcgacggtattgctattactcggaggattagtatttgcaatttttgcatatgtagatcattcgaataaagctaaagaacgtatgttgaacgaacaaaagcaggaacaaaaagaaaagcgtcaaaaagaaaatgcagaaaaagagagaaagaaaaagcaacaagaggaaaaagagcagaatgagctagattcacaagcaaaccaatatcagcaattgccacagcagaatcaatatcaatatgtgccacctcagcaacaagcacctacaaagcaacgtcctgctaaagaagagaatgatgataaagcatcaaaggatgagtcgaaagataaggatgacaatgcatctcaagataaatcagatgataatcagaagaaaactgatgataataaacaaccagctcagcctaaaccacagccgcaacaaccaacaccaaagccaaataataatcaacaaaataatcaatcaaatcagcaagcaaaaccacaagcaccacaacaaaatagccaatcaacaacaaataaacaaaataatgctaatgataagtagtatttagtcaaacaaaaatgaaccagtatgacagacaacacaattaattaggttgtctcgaatattggttcttatttttataattgttaattaggggagagatgatacttaaatagttagttgtttattttacggatagtgaaatttattttgagtgaggtgggacagaaatgatattttcgcaaaatttatttcgtcgtctgaccccaacttccacattattgtaagctgactttccgtcagcttctgtgttggggccccgccaacttgcacattattgtaagctgactttccgtcagcttctgtgttggggccccgccaacttgcacattattgtaagctgactttccgccagcttctgtgttggggccccaccccaacttgcattgcctgtagaaattggaaatccaatttctctatgttggggcccctgactttaattggaaaaagcttgttacaagtgcattttcgttcggtcaactactactaatgtgacttttcggattctagagcattgttttatgtcttagtctcaaataataagcaaatgattagcgagtcagtataagggtatacatttgactacagcgaataaaataaaacgttttgttgaataacaaatcgaaaatgtattgcaagcgctttatcaaattatttagaaaatttaagttttatgcttgcaatttttgaaatagaatagtactattgcaagtgtaaagaggttaatttttgtcccacgcgggacttaaaaaggcaaccactggttgtgacatatccttatttacatttataaatataaggaggaggtagtagtgaaagacttattgcaagcacagcaaaagcttataccggatctcatagataaaatgtataaacgtttttctattcttactactatctcaaaaaatcagcctgtcggacgtcgaagtttaagcgaacatatggatatgactgaacgtgtactgcgttctgaaacagatatgcttaagaaacaagatttgataaaagttaagcctaccggaatggaaattacagctgaaggtgagcaactgatttcgcaattgaaaggttactttgatatctatgcagatgataatcgtctgtcagaaggtattaagaataaatttcaaattaaggaagttcatgttgttcctggtgatgctgataatagtcaatctgttaaaacagaattaggtagacaagcaggtcaattacttgaaggcatattacaagaagacgcgatagttgctgtaactggcggatccacgatggcatgtgttagtgaagcaattcatttattaccatataatgtattcttcgtaccagccagaggtggactaggcgaaaatgttgtctttcaggcaaacacaattgcagccagtatggcacaacaagctggcggttattatacgacgatgtatgtacctgataatgtcagtgaaacaacatataacacattgttgttagagccatcagtcataaacactttagacaaaattaaacaagcaaacgttatattacacggcattggtgatgcgctgaagatggcgcatcgacgtcaatcacctgaaaaggtcattgaacaacttcaacatcatcaagctgtcggagaggcatttggttattattttgatacacaaggtcaaattgtccataaggttaaaacaattggacttcaattagaagaccttgaatcaaaagactttatttttgcagttgcaggaggcaaatcgaaaggtgaagcaattaaagcatacttgacgattgcacccaagaatacagtgttaatcactgatgaagccgcagcaaagataatacttgaataagagataaaaagtttaatactttttaaatatcattttaaaggaggccattataatggcagtaaaagtagcaattaatggttttggtagaattggtcgtttagcattcagaagaattcaagaagtagaaggtcttgaagttgtagcagtaaacgacttaacagatgacgacatgttagcgcatttattaaaatatgacactatgcaaggtcgtttcacaggtgaagtagaggtagttgatggtggtttccgcgtaaatggtaaagaagttaaatcattcagtgaaccagatgcaagcaaattaccttggaaagacttaaatatcgatgtagtgttagaatgtactggtttctacactgataaagataaagcacaagctcatattgaagcaggcgctaaaaaagtattaatctcagcaccagctactggtgacttaaaaacaatcgtattcaacactaaccaccaagagttagacggttctgaaacagttgtttcaggtgcttcatgtactacaaactcattagcaccagttgctaaagttttaaacgatgactttggtttagttgaaggtttaatgactacaattcacgcttacacaggtgatcaaaatacacaagacgcacctcacagaaaaggtgacaaacgtcgtgctcgtgcagcggcagaaaacatcatccctaactcaacaggtgctgctaaagctatcggtaaagttattcctgaaatcgatggtaaattagatggtggtgcacaacgtgttcctgtagctacaggttcattaactgaattaacagtagtattagaaaaacaagacgtaacagttgaacaagttaacgaagctatgaaaaatgcttcaaacgaatcattcggttacactgaagacgaaatcgtttcttcagacgttgtaggtatgacttacggttcattattcgacgctacacaaactcgtgtaatgtcagttggcgaccgtcaattagttaaagttgcagcttggtatgataacgaaatgtcatatactgcacaattagttcgtacattagcatacttagctgaactttctaaataattttagtatagtttttattcaaatacgctagtgctcagaactatttagcattaattaaagcttatgagtaagcggggagcacaaacgcttctccgcttatttttatataaaatttcctaattacaaggaggaaacaccatggctaaaaaaattgtttctgatttagatcttaaaggtaaaacagtcctagtacgtgctgattttaacgtacctttaaaagacggtgaaattactaatgacaaccgtatcgttcaagctttacctacaattcaatacatcatcgaacaaggtggtaaaatcgtactattttcacatttaggtaaagtgaaagaagaaagtgataaagcaaaattaactttacgtccagttgctgaagacttatctaagaaattagataaagaagttgttttcgtaccagaaacacgcggcgaaaaacttgaagctgctattaaagaccttaaagaaggcgacgtattattagttgaaaatacacgttatgaagatttagacggtaaaaaagaatctaaaaatgatccagaattaggtaaatactgggcatctttaggtgatgtgtttgtaaatgatgcttttggtactgcgcatcgtgagcatgcatctaatgttggtatttctacacatttagaaactgcagctggattcttaatggataaagaaattaagtttattggtggcgtagttaacgatccacataaaccagttgttgctattttaggtggagcaaaagtatctgacaaaattaatgtcatcaaaaacttagttaacatagctgataaaattatcatcggcggaggtatggcttatactttcttaaaagcgcaaggtaaagaaattggtatttcattattagaagaagataaaatcgacttcgcaaaagatttattagaaaaacatggtgataaaattgtattaccagtagacactaaagttgctaaagaattttctaatgatgccaaaatcactgtagtaccatctgattcaattccagcagaccaagaaggtatggatattggaccaaacactgtaaaattatttgcagatgaattagaaggtgcgcacactgttgtatggaatggacctatgggtgtattcgagttcagtaactttgcacaaggtacaattggtgtatgtaaagcaattgcaaaccttaaagatgcaattacgattatcggtggcggtgattcagctgcagcagcaatctctttaggttttgaaaatgacttcactcatatttcaactggtggcggcgcgtcattagagtacctagaaggtaaagaattgcctggtatcaaagcaatcaataataaataataaagtgatagtttaaagtgatgtggcatgtttgtttaacattgttacgggaaaacagtcacaagatgacatcgtgtttcatcacttttcaaaaatatttacaaaacaaggagtgtctttaatgagaacaccaattatagctggtaactggaaaatgaacaaaacagtacaagaagcaaaagacttcgtcaatgcattaccaacattaccagattcaaaagaagtagaatcagtaatttgtgcaccagcaattcaattagatgcattaactactgcagttaaagaaggaaaagcacaaggtttagaaatcggtgctcaaaatacgtatttcgaagataatggtgcgttcacaggtgaaacgtctccagttgcattagcagatttaggcgttaaatacgttgttatcggtcattctgaacgtcgtgaattattccacgaaacagatgaagaaattaacaaaaaagcgcacgctattttcaaacatggaatgactccaattatttgtgttggtgaaacagacgaagagcgtgaaagtggtaaagctaacgatgttgtaggtgagcaagttaagaaagctgttgcaggcttatctgaagatcaacttaaatcagttgtaattgcttatgagccaatctgggcaatcggaactggtaaatcatcaacatctgaagatgcaaatgaaatgtgtgcatttgtacgtcaaactattgctgacttatcaagcaaagaagtatcagaagcaactcgtattcaatatggtggtagtgttaaacctaacaacattaaagaatacatggcacaaactgatattgatggggcattagtaggtggcgcatcacttaaagttgaagatttcgtacaattgttagaaggtgcaaaataatcatggctaagaaaccaactgcgttaattattttagatggttttgcgaaccgcgaaagcgaacatggtaatgcggtaaaattagcaaacaagcctaattttgatcgttattacaacaaatatccaacgactcaaatcgaagcgagtggcttagatgttggactacctgaaggacaaatgggtaactcagaagttggtcatatgaatatcggtgcaggacgtatcgtttatcaaagtttaactcgaatcaataaatcaattgaagacggtgatttctttgaaaatgatgttttaaataatgcaattgcacacgtgaattcacatgattcagcgttacacatctttggtttattgtctgacggtggtgtgcacagtcattacaaacatttatttgctttgttagaacttgctaaaaaacaaggtgttgaaaaagtttacgtacacgcatttttagatggtcgtgacgtagatcaaaaatccgctttgaaatacatcgaagagactgaagctaaattcaatgaattaggcattggtcaatttgcatctgtgtctggtcgttattatgcaatggaccgtgacaaacgttgggaacgtgaagaaaaagcttacaatgctattcgtaattttgatgccccaacttatgcaactgccaaagaaggtgtagaagcaagctataatgagggcttaactgacgaattcgtagtaccattcatcgttgagaatcaaaatgacggtgttaatgatggagatgcagtgatcttctataatttccgacctgatagagcagcacaattatcggaaatttttgcgaacagagcattcgaaggctttaaagttgaacaagttaaagacttattctatgcaacattcactaagtataacgacaatatcgatgcggctatcgttttcgaaaaagttgatttaaataatacaattggtgaaattgcacaaaataacaatttaacacaattacgtattgcagaaactgaaaaatatcctcacgttacttactttatgagtggtggacgtaacgaggaatttaaaggtgaacgccgtcgtttaattgattcacctaaagttgcaacgtatgacttgaaaccagaaatgagtgcttatgaagttaaagatgcattattagaagagttaaataaaggtgacttggacttaattattttaaactttgctaaccctgatatggttggacatagtggtatgcttgagccgacaatcaaagcaatcgaagcggttgatgaatgtttaggtgaagtcgttgataagattttagacatggacggttatgcaattattactgctgaccatggtaactctgatcaagtattgacggatgatgatcaaccaatgactacgcatacaacgaacccagtaccagtgattgtaacaaaagaaggcgttacacttcgagaaactggtcgcttaggtgacttagcacctacattattagatttattaaatgtagaacaacctgaagacatgacaggtgaatctttaattaaacactaatattgtaaaagatgttaagtaaacgcttaatgacacttattttttgaaaataatagtaatatcattttgttaaatgaaagaataaagctataataattatagaataactatttaaaggagattataaacatgccaattattacagatgtttacgctcgcgaagtcttagactctcgtggtaacccaactgttgaagtagaagtattaactgaaagtggcgcatttggtcgtgcattagtaccatcaggtgcttcaactggtgaacacgaagctgttgaattacgtgatggagacaaatcacgttatttaggtaaaggtgttactaaagcagttgaaaacgttaatgaaatcatcgcaccagaaattattgaaggtgaattttcagtattagatcaagtatctattgataaaatgatgatcgcattagacggtactccaaacaaaggtaaattaggtgcaaatgctattttaggtgtatctatcgcagtagcacgtgcagcagctgacttattaggtcaaccactttacaaatatttaggtggatttaatggtaagcagttaccagtaccaatgatgaacatcgttaatggtggttctcactcagatgctccaattgcattccaagaattcatgattttacctgtaggtgctacaacgttcaaagaatcattacgttggggtactgaaattttccacaacttaaaatcaattttaagcaaacgtggtttagaaactgcagtaggtgacgaaggtggtttcgctcctaaatttgaaggtactgaagatgctgttgaaacaattatccaagcaatcgaagcagctggttacaaaccaggtgaagaagtattcttaggatttgactgtgcatcatcagaattctatgaaaatggtgtatatgactacagtaagttcgaaggcgaacacggtgcaaaacgtacagctgcagaacaagttgactacttagaacaattagtagacaaatatcctatcattacaattgaagacggtatggacgaaaacgactgggatggttggaaacaacttacagaacgtatcggtgaccgtgtacaattagtaggtgacgatttattcgtaacaaacactgaaattttagcaaaaggtattgaaaacggaattggtaactcaatcttaattaaagttaaccaaatcggtacattaactgaaacatttgatgcaatcgaaatggctcaaaaagctggttacacagcagtagtttctcaccgttcaggtgaaacagaagatacaacaattgctgatattgctgttgctacaaacgctggtcaaattaaaactggttcattatcacgtactgaccgtattgctaaatacaatcaattattacgtatcgaagatgaattatttgaaactgctaaatatgacggtatcaaatcattctataacttagataaataatcattttaaacattaagtactgccataattttagttgaggattattatgtcggtataaattgaataaagtttttgagttcacgcttaaaaagttcacgcttgtatttataacctgccacagagttgagactgtggtaggttttttattttgaagtattattcataacagactaataatcatgaggtaactaataacacatatttaacttgtattcttaaactggtataataaatttatgttgaaatgaatattgtatgacagggtattcacttttattaaaaggtaaaattaaataaaggttttatagaacgtatttaaatatatgaggagtaaacaaatggctgatagaacgaataaagaaattaaaacaggacgctttattgcaactgcatcaatcgtattctcaatattattgattattcattactttgtttcgttggataatgcgactgccaaagcattacttaatttaacgaatcaaaacacttcagataaagcgattgattacattttaaacagctttagattcactggtattatgtatattttggcttatctagcaggcttcatcactttttggaatcgacatacttatgtgtggtggtttatgtttgcagtttatgtatcaaatagtttgtttacgttgattaatttatcaatcacaattcaagcaataaaagctgcacacggtgcgtacttaacattgccaattttaatcgttattataggttcggttgcattagcgatttatatgcttgttgtttctatcaaacgtaaaagtacatttaatcgctagaaaattgattttaacaataaaaatatgatatactacttgtcgtatataaggaacggaggacaatttatgcatacatttttaatcgtattattaatcattgattgtattgcattaataactgttgtactactccaagaaggtaaaagcagtggactttcaggtgccatcagtggtggtgctgagcagttattcggtaaacaaaaacaacgtggcgtcgatttattcttaaatagattaacaattattttatcaatattattttttgtacttatgatttgcataagttatcttggtatgtaaggtccggcgatgtaaatgtcgggcttttttatttataattaagaatgtaatagtttaacaataagctatgtaaaatatatagcctagttaagtatgcaaagggagcgttagatttatgcagataaaattaccaaaacctttcttttttgaagaaggcaaacgtgccgtgttattattacatggatttacaggcaattcgtctgatgtacgtcaattaggtcgatttttacaaaaaaagggatatacttcgtatgcaccacaatatgaaggtcacgcggcaccaccagaggaaatactgaaatctagtcctttcgtttggtttaaagatgcgttagatggttatgattatcttgttgaacaaggttatgatgaaattgttgttgctggtctatcattaggtggggattttgctttaaaattaagcttaaatagagatgtaaagggtattgtaacgatgtgtgcaccaatgggtggcaaaactgaaggtgccatttatgaaggctttttagagtatgcacgtaattttaaaaagtatgaaggtaaaaatcaagagactattgataatgaaatggatcattttaaaccaactgaaactttaaaagaactaagtgaagcattagatacgattaaagatcaagttgatgaggtatttgacccaattttagtgattcaagtagaaaacgacaatatgattgatccacaatccgcaaattatatatatgaccatgtagattctgatgacaaagacatcaagtggtatagtcaatcaggacatgttattacgattgataaagaaaaagaacaagtatttgaagatatttatcaatttttagagtcattagactggtcagaataaaaagagattttaacattagaaaggaggggcataatgaatttaaagcaatcaatagaagagattattaatcaacctgaatatgaacctatgtcagtgtcagattttcaagatgcattaggtttaagtagtgccgactcatttagagatttaattaaggtgctcgtagaattagaacaatcaggattaattgaacgtacaaaaacagacagatatcaaaaaaagcatagttcaaaaggtcattcaaaattgataaagggaacgttaagtcaaaataaaaaaggctttgcattcttaagacctgaagatgaggatatggaagatatatttattcccccaacaaaaattaatcgtgccttagatggagatactgtaattgtagaaatacatcaatctaaaggtgaacataaaggtaaaattgaaggggaagttaagtcgattgagaagcattcagtaactcaagttgttggtacgtatagtgaagctagacatttcggatttgttattccagatgataaacgtattatgcaagatattttcattcctaaaggacaaagtttaggtgcagtagatgggcataaggtacttgttcaaattactaaatatgctgatggttcagataatccagaaggacatatttctgctattttaggacataaaaatgatcctggcgtagatattttatctattatctatcaacatggcatagaaattgaatttcctgatgaagtgttacaagaagctgaagcagtacctgatcatattgaaaatactgaaattaaaggccgtcatgatttacgtgatgaattgacaatcacaattgatggtgctgatgctaaagacttagatgacgcaattagtgttaaaaagttagcgaacggtaatacgcagttgactgtaagtattgctgatgtcagttattatgtaactgaagattcagctttagataaagaagcttatgatagagcgacaagtgtatatcttgttgaccgtgtgattccgatgattccacatcgattaagcaatggtatttgttcattaaatcctcatgttgatcgtttaacgttaagctgtcgcatggaaatcgatgctagtggtcgcgttgttaaacatgaaatttttgatagtgttatacattctgattatcgaatgacgtatgatgcggtaaatcagattattactgaaaaggatcctaacattcgcgaacaatataaagaaattacgcctatgttagatttagcacaagatttatctaatcgtttgattcaaatgagaaaacgacgtggtgaaatcgattttgatattagtgaagcaaaagtattagttaacgaagtcggtataccaacagatgttcaattaagacaacgtggcgagggtgaacgtctaattgaatcatttatgttaattgcaaatgaaacagttgctgaacattttagtaagttaaatgtaccttttatttaccgagtgcatgagcaacctaaatcagatcgcttaagacaattctttgattttattacaaactttggcatcatgattaagggcactggcgaagatattcatccaacaacacttcaaaaggttcaagaagaagtagaaggtcgacctgaacaaatggtcatttcaacaatgatgttacgttcaatgcaacaagcgcattatgatgatgtgaacttgggacattttggcttatcagctgaatattatacgcattttacatcaccaattagacgttatcctgatttaacagttcatcgtttaatccgtaagtatttaattgagaaatcaatggataacaaagaagtgaagcgttgggaagacaaattgcctgagttagctgaacatacttctaaacgtgaacgtcgtgctattgaggcagaacgtgatactgatgaattgaaaaaagcagaatatatgattcaacatattggtgatgaatttgaaggtattgtcagctcagtagctaacttcggtatgttcattgaattgccaaatacgatagaaggtatggttcatattgcgaatatgactgatgattattaccgttttgaagagcgtcaaatggcattaattggtgagcgtcaagctaaagtatttagaattggtgacacagttaaggttaaagtgacgcatgttgatgtagatgaacgattaattgattttcaaattgttggaatgcctttacctaaaaatgaccgctcacagcgaccagcaagaggtaaaacgattcaagctaaaacgcgtggcaaatctttagataaatcgaaatctgatgataagggtcgtaagaaaaaaggtaagcaacgtaaaggtaaaaaccaacgtaataatgataaatcaggtaatagtaagcataagccattttataaagataaaagtgtgaaaaagaaagcacgtcgtaagaaaaaataagcagcaatgaggtgagtatgaatggctaagaagaaatcaccaggtacattagcggaaaatcgtaaagcaagacatgattataatattgaagatacgattgaagcgggaatcgtattacaaggtacagaaataaaatcgattcgccgaggtagtgctaaccttaaagatagttacgcgcaagttaaaaacggtgaaatgtatttgaataatatgcatatagcaccatacgaagaagggaatcgttttaatcacgatcctcttcgttctcgaaaattattattgcataaacgtgaaatctttaaattaggtgaacaaactcgagaaattggttattcgattgtgccgttaaagctttatttgaagcatggacattgtaaagtattacttggtgttgcacgaggtaagaaaaaatatgataaacgtcaagctttgaaagaaaaagcagtcaaacgagatgttgcgcgcgatatgaaagcccgttattaagcgatttagttgcttaatcgggctatatttgatatagttatatgtgcttttgtaaattacaaaagtatgatttgtttgatttattatttcggggacgttcatggattcgacaggggtcccccgagctcattaagcgtgtcggagggttggcttcgtcatcaacacacacagtttataataactggcaaatcaaacaataatttcgcagtagctgcctaatcgcactctgcatcgcctaacagcatttcctatgtgctgttaacgcgattcaaccttaataggatatgctaaacactgccgtttgaagtctgtttagaagaaacttaatcaagctagcatcatgttggttgtttatcacttttcatgatgcgaaacctttcgataaactacacacgtagaaagatgtgtatcaggacctctggacgcgggttcaaatcccgccgtctccatatttgtagcctacaacctttgtggatgtaggcttttttattatgtgtttttcaggggataatgcattgcagaatttgttgtgagtattgatatagcagtgtttgtataggtgtttatttgatggaggaaagagtaataagtgattatgaattagtttttgagatataaggggacagtgatgtgtgtcaaataagtgtcaaaaaagttggattctgagttttacattcaacattgttcatgaagaaacttctttatacgcaaaaaattctccatgttatatatgtcaatataaaaatgtgaatcgtctacacttaattggataaatggctactgaaaaagaacttttcatttttgttacgtcactaagtgggtgtagttataaagagatgagccgagttttgatattttcattagaatcaatatgcctattaacacaatcagcaatagttgacgagacggaaataaaagaagtcgtagttaagaaatgcatttcacaacataccattgtagccatttttattgttttggatgataaactctttttggaatttttagtttttataatttgcaactacactacttcttttactaatattaatgtctaagtaatcgataaaaaattctccattgaataaatgagaagttaaaaactttacttaacctttctcattgcattttcctattcacgattttaagaacccaacatactacaaacgaattttaaaaggcgagagtaaagcttacttgtttattatacagatttaaaatccaagagtcagaacagactactcctctttataactataaaaaatagctatgaaaaaatctatcgtcatagattccttcatagctaatcttagtatgtttatttttattttaggatgctatttatcaactcaacatataactcactatttttataaccttctaatatatcattaacttgtctaataggtatttctggtacttctctaatgttttccaattttgttttaaattgtttttttgttatttgctctttatttgtagccaattggaacaagtaagaatctagcatattaatttctttatatgaatacatatatcttaataacactaaatctctagtttttaagttaggcgctagttcttcttgtaattgttctattgattgtttcattaataacaatctcatttctaattcttcattattcattttatcacactctttttatattaatgcttgaccaacttgggaaacccaaaaccctatgcttcttgcagtagaatctttaataccagttcccatcaatgcttgtgaaacttgaccttgtacatttccccatgtagcctcttcttgttttaatgcattattcaatgcgggatttacaaatttatcccatcttttttttatgattttccggcacggggactgatttctttaacaccattaaacacagattttttatttttaatcatagttttatagtatcatgttggctaagctataaataagtcagtttctctaaaaattaaataactgaatgtaagacaatcaacaaaccaaatttatacttcatctaaactactgtggtcgtcatctttttgcttttctttttctttctctcgttcttgttcttttttgtactcttcttcaaattctttttctttcttttctacttcttctcttgtttccgctctatgagaaaaatcttcggttttaagtttactaaatttgaatgatttagaatcaactgttttatcttctgagtatttatggacatttaaattaatatttccatcacctcttaactcatagataaacatggcttgtgcagttttgccttttttaatttgatcttggttatgttctgtccaatctttatattttttatcacttaaaagataaccatctcttaatttatttactgtatttttatcatcttgagtgatattaatatagtcatgagaaatagaagatggatttaaatctttatcgtcttttttagcagtaatttccattttaaaagcgatatatttctttttctcatctttttcattgatgataaacggttcttttattttagcttcaaatttgtcactaacaatagtatcgcctttaatttttatatccatattttttttgcttttaaattctttaagttcttcatttaattcttcattgtcattttctttctttttgtgactagcgctctctttttttgcactatcttgatgatgtccacaagcacctaagataagtgtacttgctaataatatccccattacttttttcatttaacatgtctcctttatttcgcaaaaatttattttaaaaactctaaatgacttatcattttgagtaattaaacaaagttgatattttgtgagattctaagatgatattaaataattcttgtaataatgatcctatgtattgttgcaataaattaatgaaactataattactaatattatattacttttattgatagaaatatattacttttttaaaaaacttgtaatatatcgaaagatttaaatgtaaaattttgatttgttaagaaattacgtttgtaaaaataaaaaaatcaacttatttgtatgagatgaatatgtattgaagaagatgtgttattaatttggaaaatactggtcaaagatgggagctcttaaaagcgttattgtattttttagtcaatgcaaatagattgccgtaataataatcgtacttgatggttaaaaaattacttaaggctataaagcaaaactttttatatgagcagtcgaatataacgtttaaaatgattgtttttggatataaacgattaagtaaaatgctttttcagtttgaaattaatcatataaatttcttatgggaaggttgatatcttaatgattaatatcatttcagctataggatctattggaacatttattatggctttattttattttgtatcagtttcagttcaactttatcaaatgaaaattagctttctgccagctttaggttttaaccaaattttattagaaagggagaaggatcaacttaatataatgaattcggcaacagaagagcatcatcataaagattatattaaactatataatttaggtggcggtgctgctaaaaaaattgcaatagaggttttattgggtaatgataaagtcattcagaaaaaatacgtgaatattttacctagtaaagaagggtacatgttaccaattaataaaaatgtgtacgaagaattagaaagaacgattgagaataatggttatgaagctgatttgaatgtacgtatgacttattatcataatgtaagtcgcaaacaacaggaagttatattaaaaggtcaaatcgaccgttttaatacttataataataaagaaatttatgatttgcagtttatctaaaaattgatttaagagggtagttgtttattgcgaaaaatatcattcaattttaatgaaataatggcgtcattactataaaatattactttatgttgtaatgcatttttctataagatagaactaaaaggaggggcaaagatgcaaattagacaaatacatcaacatgactttgctcaagttgaccagttaattagaacggcatttgaaaatagtgaacatggttatggtaatgaatcagagctagtagaccaaattcgtctaagtgatacgtatgacaataacttagaaatagtagctgttcttcaaaacgaagttgtagggcacggtttactaagtgaagtttatcttgataacggagcacaacgggaaattggattagtgttagcacctgtatctgttgatattcatcatcaaaataaaggtattgggaagcgattgattcaagcattagaacgagaagcaatattaaaaggatataattttatcagtgtattaggatggccgacgtattatgccaatctaggatatcaacgcgcaagtatgtacgacatttatccaccatatgatggtataccagacgaagcgtttttaattaaagaattaaaagtgaacagtttagcgggaaaaacaggtaccataaattacacatctgcttttgaaaaaatatgatttaaagctaggattacattaggtagagttcatattaataataaaaaatgtttgcaatcaaatcgtacgttgtcgtttgtaattcttaaaatagcaataaataaaatgtttgttagtaaagtattattgtggataataaaatatcgatacaaattaattgctataatgcaattttagtgtataattccattaacagagattaaatatatctttaaagggtatatagttaatataaaatgactttttaaaaagagggaataaaatgaatatgaagaaaaaagaaaaacacgcaattcggaaaaaatcgattggcgtggcttcagtgcttgtaggtacgttaatcggttttggactactcagcagtaaagaagcagatgcaagtgaaaatagtgttacgcaatctgatagcgcaagtaacgaaagcaaaagtaatgattcaagtagcgttagtgctgcacctaaaacagacgacacaaacgtgagtgatactaaaacatcgtcaaacactaataatggcgaaacgagtgtggcgcaaaatccagcacaacaggaaacgacacaatcatcatcaacaaatgcaactacggaagaaacgccggtaactggtgaagctactactacgacaacgaatcaagctaatacaccggcaacaactcaatcaagcaatacaaatgcggaggaattagtgaatcaaacaagtaatgaaacgacttctaatgatactaatacagtatcatctgtaaattcacctcaaaattctacaaatgcggaaaatgtttcaacaacgcaagatacttcaactgaagcaacaccttcaaacaatgaatcagctccacagaatacagatgcaagtaataaagatgtagttagtcaagcggttaatccaagtacgcctagaatgagagcatttagtttagcggcagtagctgcagatgcaccggcagctggcacagatattacgaatcagttgacagatgtgaaagttactattgactctggtacgactgtgtatccgcaccaagcaggttatgtcaaactgaattatggtttttcagtgcctaattctgctgttaaaggtgacacattcaaaataactgtacctaaagaattaaacttaaatggtgtaacttcaactgctaaagtgccaccaattatggctggagatcaagtattggcaaatggtgtaatcgatagtgatggtaatgttatttatacatttacagactatgttgataataaagaaaatgtaacagctaatattactatgccagcttatattgaccctgaaaatgttacaaagacaggtaatgtgacattgacaactggcataggaaccaatactgctagtaagacagtattaatcgactatgagaaatatggacaattccataatttatcaattaaaggtacgattgatcaaatcgataaaacaaataatacgtatcgccaaacaatttatgtcaatccaagcggagataacgttgtgttacctgccttaacaggtaatttaattcctaatacaaagagtaatgcgttaatagatgcaaaaaacactgatattaaagtttatagagtcgataatgctaatgatttatctgaaagttattatgtgaatcctagcgattttgaagatgtaactaatcaagttagaatttcatttccaaatgctaatcaatacaaagtagaatttcctacggacgatgaccaaattacaacaccgtatattgtagttgttaatggccatattgatcctgctagtacaggtgatttagcactacgttcgacattttatggttatgattctaattttatatggagatctatgtcatgggacaacgaagtagcatttaataacggatcaggttctggtgacggtatcgataaaccagttgttcctgaacaacctgatgagcctggtgaaattgaaccaattccagaggattcagattctgacccaggttcagattctggcagcgattctaattcagatagcggttcagattctggcagtgattctacatcagatagtggttcagattcagcgagtgattcagattcagcaagtgattcagactcagcgagtgattcagattcagcaagtgattcagattcagcaagtgattcagattcagcaagtgattcagactcagcaagtgattcagattcagcaagtgattcagattcagcaagcgattcagattcagcgagcgattcagattcagcgagcgattcagattcagcgagtgattccgactcagcgagcgattcagactcagatagtgactcagattccgatagcgattccgactcagatagcgactcagattcagacagcgattctgactcagacagcgattctgactcagacagtgactcagattccgatagcgattccgactcagacagcgattcagattccgatagcgattcagattccgacagtgactcagattccgatagtgactcggattcagcgagtgattcagattcagatagcgattcagaatcagatagtgactcagactcagacagtgattcagattcagatagtgactcagactcagacagcgattcagaatcagatagtgactccgattcagacagcgattcagaatcagatagtgactccgattcagatagcgattcggattcagcgagtgattcagactcaggtagtgactccgattcatcaagtgattcagattccgattcaacgagtgacacaggatcagacaacgactcagacagtgattcaaatagcgattccgagtcaggttctaacaataatgtagttccgcctaattcacctaaaaatggtactaatgcttctaataaaaatgaggctaaagatagtaaagaaccattaccagatacaggttctgaagatgaagcgaatacgtcactaatttggggattattagcatcattaggttcattactacttttcagaagaaaaaaagaaaataaagataagaaataagtaataataatattaaattaatcatatgattcatgaagaagccaccttaaaaggtggcttttttacttggattttccaaatatattgtttgaatataattaataattaattcatcaacagttaattattttaaaaaggtagatgttatataatttggcttggcgaaaaaatagggtgtaaggtaggttgttaattagggaaaattaaggagaaaatacagttgaaaaataaattgctagttttatcattgggagcattatgtgtatcacaaatttgggaaagtaatcatgcgagtgcagtggtttctggggagaagaatccatatgtatcaaaagctttagaattgaaagataaaagtaataaatccaattcttacgaaaattatagagatagtttagaaagtttgatttcatcattatcttttgctgattatgaaaaatatgaagagccagaatatgaaaaggctgtaaaaaaatatcaacaaaaatttatggctgaagatgatgcattaaaaaattttttaaatgaagaaaagaagataaaaaatgcagatattagcagaaaatcgaatgatttattaggtttaacacatgaaagatattcttatatttttgatacattaaagaaaaataaacaagagtttttaaaagatattgaagaaatacaactgaaaaatagtgatttaaaggactttaacaatacagagcaacataatgccgacgtagaaataaacaatttagaaaataaagtattaatggtagggtatacattctataatacaaataaggacgaagttgaagaattatatagtgagttagatttgattgttggagaagttcaagataagtcggataaaaaaagagcagtaaatcaaaggatgttaaatagaaaaaaagaggatttagaatttattatagataaattttttaaaaaaattcaacaagaacgtccagagagtataccagcattaactagtgaaaaaaatcataatcagactatggcattaaagttaaaagcagatacagaagctgctaaaaatgacgtatcaaaaagaagtaaaagaagtttaaatactcaaaataataaatctacaacacaagaaatttctgaagaacaaaaagctgaatatcaaagaaagtcagaggcattaaaagaaagatttataaacagacaaaaatctaaaaatgagtctgtggtttcactaatcgatgacgaagacgacaacgaaaacgacaggcaacttgtggtttctgcgccatcaaagaaaccaacaacaccgactacatatactgaaacaacgactcaggtaccaatgcctacagttgagcgtcaaactcagcaacaaatcgtttacaaaacaccaaaaccattagctggattaaatggtgaaagtcatgatttcacaacaacgcatcaatcaccaacaacttcaaatcatacgcataataatgttgttgaatttgaagaaacgtctgctttacctggtagaaaatcaggatcactggttggtataagtcaaattgattcttctcatctaactgaacgtgagaagcgtgtaatcaagcgtgaacacgttagagaagctcaaaagttagttgataattataaagatacacatagttataaagaccgattaaatgcacaacaaaaagtaaatactttaagtgaaggtcatcaaaaacgttttaataaacaaatcaataaagtatacaatggcaaataatattaatgcatggctgcaaagcaaataatgagtttgtcgtaaaaataacaacattttaaactagcaataaataatatcaaagtcatcatttcaatgatgcaatctagtatagtccacattctaaacaggtgtggactattacttttttcactttatattacgaaaaaattattatgcttaactatcaatatcaataattaattttaagctgaaaaacaataaaaatgttaagacaacgtttacttcaagttaattattatactgaaaattctggtatataatgctgttagtgaatataacagggaaattatattggttataatattgagtctatataaaggagaaataacagatgaaaaagaaattattagttttaactatgagcacgctatttgctacacaacttatcaattcaaatcacgctaaagcatcagtgacagagagtgttgacaaaaaatttgtagttccagaatcaggaattaataaaattattccagcttacgatgaatttaagaattcgccaaaagtaaatgttagtaatttaactgacaataaaaactttgtagtttctgaagacaaattgaataagattgtagattcatcggcagctagtaaaattgtagataaaaactttgccgtaccagaatcaaagttaggaaacattgtaccagagtacaaagaaatcaataatcgcgtgaatgtagcaacaaacaatccagcttcacaacaagttgataagcattttgttgctaaaggcccagaagtaaatagatttattacgcaaaacaaagtaaaccaccacttcattactacgcaaacccactacaagaaagttattacttcatacaaatcaacacatgtacataaacatgtaaatcatgcaaaggattctattaataaacactttattgttaaaccatcagaatcgcctagatatacacatccatctcaatctttaattatcaagcatcattttgcagttcctggatatcacgcgcataaatttgttacaccagggcatgctagcattaaaattaatcacttttgtgttgtgccacaaataaatagtttcaaggtaattccaccatatggtcacaattcacatcgtatgcatgtaccaagtttccaaaataacacaacagcaacacatcaaaatgctaaagtaaataaagcatatgactataaatacttctattcttataaagtagttaaaggtgtgaagaaatatttctcattttcacaatcaaatggttataaaattgggaaaccatcattaaatatcaaaaatgtaaattatcaatatgctgttccaagttatagccctacacactacgttcctgaatttaagggtagcttaccagcaccacgagtataaaaattggcactaagtttacgagatatgataaatacctattattttaaatatagtctacaatctatgtggttgtaggctgtattttttgcagtttatcaataaacacccatcaacaaattataccgtttttctactttgaaagttggaagtaacataatcttaaataaatatattattaattaagataaatataagactcaagattattgttaatagtttgttcatcgcaagttaattattgtttctaaaatattggtatataattttcaatggcgaagaaaacagggtgaaaaagtcggttttacaatcaaagcaaataagggagcataaataaatgaaaaggaaagtactagtactaacaatgggtgtaatttgtgcaactcaattatggcattctaatcacgcaaacgcattagtgacagagagtgttgaaactaattttgttgtaaaagattcggataataaaaatattttacaaacccatactgaaattactactgaggagaaattttcaatagtagaaaagagtcaattaaataaattaaaagcactatctaatgacaactacatagaatatgatttacatactaatcaaacaggtattaaaaaaggttggttatatggttatagtgaaattgactcatcacatttcacagaccgtgacaaacgcgttattagacgtgatcatgttaaagaagcacaaagcttaattaacgattataaagatacacaaagctatgaagatctcgctaaggcaactgcaaaagtaagtacacttagtcagtctcaccaaaattatttaaataaacaaattgataaagtgaataataaaatagagaaaactgaaaaacgctaatccaaagtaaattataagttatacatctcgtttttaaatgacaatttatccccgtaaatataataaataatcttttcaaattccgcatagatatagagacgctaataaacctctttgtctcgatatgatagtctgcaacgattcatgttgtaggctttttaattttacaaataaggctaaatatataagttctgacacctaaaatatagaaaatacataaaagtaagtatagttattttattataattattaaatttttattaattaattgtaaaaatgtagaattataattaattaacgtttaatattaaaattaactaaaaagaaagaggtgttagttatgacagaatacttattaagtgctggcatatgtatggcaattgtttcaatattacttatagggatggctatcagtaatgtttcgaaagggcaatacgcaaagaggtttttctttttcgctactagttgcttagtgttaactttagttgtagtttcaagtctaagtagctcagcaaatgcatcacaaacagataacggcgtaaatagaagtggttctgaagatccaacagtatatagtgcaacttcaactaaaaaattacataaagaacctgcgacattaattaaagcgattgatggtgatacggttaaattaatgtacaaaggtcaaccaatgacattcagactattattagttgatacacctgaaacaaagcatcctaaaaaaggtgtagagaaatatggccctgaagcaagtgcatttacgaaaaaaatggtagaaaatgcaaataaaattgaagtcgagtttgacaaaggtcaaagaactgataaatatggacgtggcttagcgtatatttatgctgatggaaaaatggtaaacgaagctttagttcgtcaaggcttggctaaagttgcttatgtttataaacctaacaatacacatgaacaacttttaagaaaaagtgaagcacaagcgaaaaaagagaaattaaatatttggagcgaagacaacgctgattcaggtcaataatgctcattgtaaaagtgtcactgctgctagtggcccttttataatttttagatcacgatatgatttattatcaattcagaattaaaaaagtaaatagtatcaaaagcaagtgtatttaatattagaaaataaaaattttaaatttagtattaaaatggaatgttactatatagttcaatgtgtattatcacagaaaataaaataatgctttacttctatatttaaaagtgtataatgaaagttaagtaataaagagcgtgaagaaaaatgtgagttatttatatagaatattctccttttcatttatgaatttgttacaaaatatttagtgcaaaagcacgacggaggtattcaatatgaataacggtacagttaaatggtttaatgcagaaaaaggttttggtttcatcgaaagagaagatggtagcgacgtattcgtacacttctcagcaatcgctgaagatggatacaaatcattagaagaaggccaaaaagttgaattcgacatcgttgaaggcgaccgtggcgagcaagctgcaaacgtagttaaaatgtaattttaacttattcaaacagtccttattatagggctgtttttttatgctttaaatcgataacagttggtgtggtaaaagcactagccgttatttttttgtccaataaattgtggagatctaacaatatataatggttctataataaatcgaattgatggaaaagttttttacttttcatctgtccgacttttgattttgaataaaaaaagcgccaatacagaactttaataatgacgagaattaaagtctgtatatggcgataacaagaagtaatgttaaacactcaaaatgtttaacaataataggataccacatcgcataatatcttactacttaattaataatttaactaatcaactttttgttaattttttattaagactgattaattattgagaatatttattgtttttaaaatctcataataattcagtaatcttgttttcatttaaaaggcgaaacattaaaataattaaataaaaatattgcgtttaatttacagcgtcaaatatacttatttctaatgctttggggtctactgaaacaagtaaagaatgatcgatgttactaatattgccattctccaaatttatttctgtgagtatttggaagctaccattaggcaatggtttaacaatagacaattgcttttccgcttgttgtattaaaaaaggttttgtagattgattattaatatgccattcactcatgtatgtttttcactcctgctttaaaatagggttaaaaagtttatagttgagacattcatgttcaaccaaaattttgttcaaattcaataaatgtcttgtttaaaatagaaatattgtaaatgttatcgtccaaaatttcaccagttaagtatttgttttgaattaaaatttggcagttagttaagaagtcttgataatcacgatcgcaaaaatagttttcacgtgcatctttagcatcgccaaaaaagttagcgactgtttctgtttctccattattcgaacgttcaatatataatttgtaaaatttagctattgtatacttttgttctttagttagttcattcaaaatattgggcctcctgaaatatcatttgtaatctatacccaatttattgcaaaacacaaactaatttaactatttgatgaaactgtgttaataagcttttacaagccttagtttgtatggatctataaaattatctttaattgcatagggtgaaataatatgtagtccataacttttaactgatttttcacttacaccaaatttataagcttggtagataattttagtacaatacgtaaattttttgctgttcaaatttaatgtaactagataacgatgatttgtattttcatagtttttcttaacccattcagccgcttttttacctgcaccaggatagctgcaacgataaactttcatccaatcatttttgccacttgcataattatatttaaaagattcgaaggattgtgtagttggtttgtcgccaggcccctcaatttgtaaaatcgttttatcatcaatcgcgatactacaatgaccaaaaaatccccacatgacagggccttttgtaacaataatatcaccaggttgtaattggaatttgtcatcttgaatttctgaatacttattatctgtaattgtttttggtgagtttataggggatacgacaacgaataatataagtaaaattatcgttcgtttaatatagttcacttaaaagctccttgttgaagaaatatatgtaaatagtcttaaattagaattgtaatctttaataagcttgtaagactaaaacatatcttaaatattaaagtatgagagtgtgaaatgtctattaagaataaaaaacagtctgaaacatcattgagacgtttcagactggatataaaatgaatttcatttatagcacaccaaatataaatgtgtatattaatatagcgaatccaaaaatatagagaatgacagtgaaacttaaataggactcttttttagattctttgccagtttttttcattaatacgagtataaacgtagcggcaactaagaaaattaatgctagccaaaacagaattgcaaaatgtaaagacatgtgaaaccctccttatataccgtaattattaacctataaaactataaaaaataggataaatgtaatagagaacgagtacgatatttataaaaaataatatttcacttaaccagtttttagttatcattgcaatggtaaaggatacgatgagtatcacaccacaaatgataataccaggcaggagccaacataaatcatctaaatctttattatatgtgattaaaatattaaagataacaaaagtggtagtaataactatattgatagcatttaacaaaatgttattcatgactgacacctactagtataaaaatagcttcttaataaatatgataacactattttccaataggtaaataaaaagtatagttatttttaaaatattatttgtagaatgctaaagtttattaattcaaacaagtgagcatatatagggatgtatagtattaatatgaaaagaatatttacatactaaaaactcttaaagttgtataattcgttaatatttttagaatcagatatcaaaaaaatgtgcaaaatcacttttgcacatttacaaatactagttttctgataagattaataataacactttaaatagcgcttaataaatgaagggggcaagtcttatgacgttttacaatttcatcatgggttttcaaaatgataacacaccatttggtatattggccgaacacgttagtgaagataaagcattccctcgattagaagaaagacaccaagtaattagagcatatgtgatgtctaattacacagatcatcaattaattgaaactacaaatagagctattagcttatatatggcaaattaatttgagtagtaccaattatgatgtattagtgcatcccaaatatcttttgttttaaagtttatttcatcatttcttatcgaaaatggtgtaataatgtctttatctaaccaagtgttgataagttcatttggtacaccatctaacaacatttcacttttactaattataaaacattcccagtcaagtgaaacattttgtggattcacataattacattgattatgatgatccataaacactcactcctttaaaattctgtactcttcattgcgttttaccccgtcacattatcttttaaactaaaatcatcattacttatgaaaaaaatgtacatcaaaagcaaaggttttcgctaccgaaaaagtttaaataatggtttaatatatttggtactcattttaataaaaagagaatacattttgagctatcaatactttttattgaagaggtgttattgttggctaaaacgttatatttaatgcgccacggacaaactttgtttaattttaagggactaattcagggatttggagattcgccgctaacagaacttggaattgctcaagctcaaaaggcacgtagttattatgaaactaaggggataaacttcgatttatatgcatcatcaacgcaagaacgcgcaagtgacacacttgaaaatgttgcacctaaccaatcgtatcaacgttttaagggactgaaggaatggcattttggaatatttgaaggtgagtcagtctatctatttgataatctatacaagcctgaggacttattcggagatcgaattgttcctttcaaaggagaggcaaggcaacaagttgaagaacgcattgtgaaaactttacatgacattatgtctcaaacaaagaataatgcattagtcgtgagtcatggaacaataatgggagtatttttaagatattgccttaaactagatgaagcattaaagcataatatcggtaattgtaatatcctgaaatttgaatatgacaatggaacatttaaatttgttgagttaattgatccaaatttataataaataaagcgttatacatagacacaagtatgtcttttgtataacgcttttaaaatacaactacataacgctttagaataataattgaataagtttttgtaatatcattagagcaacaataataattattatgcttgatattttattgattattgttaataattttccagttttatcaattgatccaaccatttttcctaaaattgcgagtaaaaagaaccataaccatgaaacgctaatacaagcgattgtaaacgcaattttattgctgccactatataatgcagcactactaccaattacaccaattgtatctaaaatagcatgtggattgagtaatgaaactgataaagcaaaacttacttgtttcattggagatataatttgagcttctccatctgttgagggtttatcatgccaaatggtccaagccatatacatcaagaaaattaaaccaactatataaataattgcttgaagtacaggtaaagacataataatgatagatactcctaccactgcaataataataagtaagctgtctgacaacccggctgtaattattgcaggcaatacatatctatattttggttgattagctccttggttaaaaataaatacattttgtgcacctaaaggtaaaattagaccaatcgctaagataaatccatgaataattgcggttaccattaagttttgacacccctaaaacatagaatattctgaaaaaacttattgttatcatatcaaataaaaaacaactactcaatagtagagtagttgtatgaaaaatagaacctatatgatttgaatttatgagaaatgtagaatatataaaactgtattacttattaatcaaatcataaaaaagccaatgttcatcgaaataggtatttccgattttaattgcatttttctcaaaaccaagaatgtcgaatcctagtgcactatagaaaactttagcacctatgttgtttgacacaattgatgtaagtaaagattcgtaattgttctgccgtgcataattaataatgaaattaatgagctcgctattaatcgatttatcgttattagtaacaaagttgtatttaattaatgatttatgttcttttccaacgtatcgaatttgttctaaggcagctgttgcgataagtgtttcgttttcataacagccaaatacaatacatttcggtgaaccttgatttaaaatgtcatgtattaaggtgtcagtcattgtttgactataatgtgaatcttgagtgaattcttcattgactgtcgaaacaagtctcttatactcattaaaatcattattcgttaatgttttaatttcaatcattactgacctccttaatcattattaagaaagattttgtactaaaaaaatttcttaattacatattaaaatgtttattaaaattttgcaatcactgatttatatgcacattcttgtaaatggattatcaatttaattatatttatttttaagttcaggaaattatggaattggttattgatcgacactggacttttatttggagacgttatgcgaagaagtcaagccagtattggaaccggtcacatttatgatgactaagggacaatcattttcagttaaatattgccagaaatttcagtcacgaatagaaaaaataaccaaccaaaaatttttggttggcaaatttgaattttatgtgaattttattaataacgttgaataatctctttaagttaatgctaatctacaacatttacatttaaatcgacattaatatttccttgagtcgcttttgaatatggacaaaattcatgagccatttgtaaatatttttcagcttcttcttgagatataacatttttaattgtcgcatcaattgaaacacttaatttaggactttctgagtctgaatcatcttctagtctcactgttagtgttacttctggatgagcatcacgcactttgttttgctttaaaattaggtcgaaagcaccgttgaagcaagatgcataacctgctgcaaataattgttcggggttagtagctttaccatctgcttgagcaggcggaacgatatcaatatctaacgctcgatcatcagtataaacatgtcctttacgtccgccaacattcgtcgctttagtttcataatgtattgccattcttataacctcctaatttaaaatacatttatgctttacccattcgaaaataccttaatcattttcatttatagcattgtttgattgaaggataaaaagttgttgtttacaataaaaataatgagtatctgaaatgagggatttactatgacacatgtggaagtagtagcgactatcgcgccacaattatctatcgaagaaactttaattcaaaaaattaatcatcgtattgatgcaatagacgtattagaattacgaattgatcaaattgaaaatgtcacagttgatcaagtggcagaaatgattacaaagctgaaggttatgcaagattcattcaaattattagttacgtatcgtacaaagttacaaggtggctatgggcaatttataaatgacttgtatcttaatttaatatcagacttagcaaatatcaatggcatagatatgattgatatagaatggcaagcagatattgacattgaaaaacatcaacgaatcattaaacacttgcaacagtataataaagaggtggttatatcacatcataatttcgaaagtacgcctccattagatgaattgcaatttatattttttaaaatgcaaaaattcaacccagaatacgttaaattagcagtaatgccacataataaaaatgatgtgttaaatttattgcaggcaatgtctacattttcagatactatggactgcaaagttgttggtatttcaatgtctaaacttggactaataagtagaacggctcaaggcgtttttggtggtgcattgacttatggttgtatcggagaaccacaagctccaggacagattgatgttactgatttaaaagcacaagtgactttatactaataaaatgaattaggttgcttttgtgtaagtgctgtcttataattgagaagtattatcattgttcgtggaggagcgattttagatggaattacaacaagcaatagctaatagaagaagtgtgaaaaaatttaaaagagatatgcacatagatgacgcattgctatatcaagcaattgagaaagctgctgatgctccaaatcacggaatgagggaaccatggagagttgtgcatgttccgaaagacagattaggagatatgagtaaggatatttctaaatttgcatttcctaatgaattagataagcaacaatgtcattatgatgcagtaacgaaactaggtggcatgttattgcttattttaaaaacagatccaagacaacgtcaaaatgatgaaaactactttgcatttggtgcatatgcacaaaatcttatgttgttactttatgaagcggggataggtacatgttggaaatcgccattatatatctatgatcctaaagtaagaaaaacacttggtataaagaaagatgaagttcttgctggattcttatatttaacggatttagaagaagatatgcctaaagcaccacgtaaaaatagaaacttaattacattatattaatatgtataattatagaaaacattaataaaagctgagacatgaattgatggacatctatcgagttagagatttaatctaatttactagagtcggtacaatcacagtctcagctttttattgtgaagtatatacacatttgtattttagtatttatttaaaagtttctgctaaaaatgattcaacttgttcaggtgacttagcatttgctgaatgaaggtgtgcaattttgtcgccgtttttaaatactagcaagctagggatacccataacttcattttcaacaactacatcttctaattcatcacgattaacagtataccattggtaatcattatattgttctacgattgggtcaatccataaatccatagcacgacagtctgggcaccatcctgcctcaaatttaacaattacaggtgtatcgctattaattatagatttaaatgattcattacttttgattgcttgcattgtaacaactcctctagatagtttaataatttttattatagctaaatttatatcataataaaaaattttagcttcaaaatgaaagccttttgctatggaaaatgatatatttattttaaatacataaaggaggttgcagtcgcatgattaaattttaccaatataagaattgtacaacttgtaaaaaggcagcaaagtttttagatgaatatggcgtaagttatgaaccaattgatatcgttcaacatacacctacaataaatgaatttaaaacaataattgcaaatacaggcgtagaaattaataaattgtttaatacacacggtgcgaaatatcgtgagcttgatttgaaaaataaattacaaactttatcagatgatgaaaagttagagttgttatcatctgatggtatgttagtaaagcgtcctctagcagtaatgggcgataagataacattaggatttaaagaagatcaatataaagagacttggttagcgtaagtgaaatgtaaacgtttactaaatatctcgatatttagattcattacatgtaaaatgaaataagctatacaattgttaatttttataaatatagttgaatagcatctagccttatggcatcattaatgatgtaaagattaattaggaggggattctcttggcagtaccaaatgaattgaaatattcaaaagagcatgaatgggttaaagttgaaggtaatgtagcaacaattggaatcacagaatacgcacaaagcgagttaggtgatattgttttcgttgaattaccagaaacagatgatgaaattaatgaaggggatacgtttggtagcgtagaatcagttaaaactgtatcagaattatatgcaccaatctctggtaaagtagttgaagtcaacgaagaactagaagatagtcccgaatttgtaaatgaatctccatacgaaaaagcatggatggtaaaagtagaaattagtgatgaaagtcagcttgaagctttattaacagctgaaaaatattcagaaatgattggtgaataatcaccgtgtaactccttaatctaagattgaggagtttatttttagtctgagtaagtaaataatatgaaagaaaatttattaggcactattatttggagtattgctacattttattattcaagaatgatgaaaataatgaatttagctattttaaaaataaaaattgggggaagttaatatgctaaacattcaagacgttagtcatctttctaaaaaggagcaaaaagcatataaccgtttcgtagaatctgtagaaaacggtaatttaccagtactaccatgtattgaaatggatttaaaagagatgcaagaagaaactttaagccagagtaagattggtggaatgccatttttaaaatcttttaaagatataccattagatgaaaataatgtaccaatggtattgttagcacagattaatttgaatgatcttccagaacaacaagaattatttcctgtaaatgaagggatattgcagttttggattagttcagaagatcaaatgtatggtatgtctgaaaatttaaagggaaacaatataaactcaaggcttgtttatataaaagagccaattacagatttatcactcgaaaatattcaagtgcatttgaagtcattagatgctgataatgaggatatcccgttcagtggagcattttctatagaatttagattgtcgaaacaaactattacatgtactgattataagtacgatgaggacgtgcttgcattgtggaataaagtcaatccatccttcgcgctaaaatcgatgtttggtggatatgatgaattaatggaacctgtgtgtaacacatttactgctaaggagccatttaatcaacttggtggttatccatattttgaccaaatagatccaagaacgaacgatcaagaactgaaaatgtatgatagagtcttactgcaaattgattctacaagagatggtaattcttcgattatatggggtgatttaggtattgccaatatcttagtgaaatctactgaccttgaggctatgaagtttgatgattacatgtattcatgggattgcagctaagagaatcataaaaatatattactttaataagtgtagtatctatagatcaatctagggagtgggacagaaatgatattttcgcaaaatttatttcgtcgtcccaccccaacttgcattgtctgtagaaattgagaatccaatttctctttgttggggcccatccccaacttgcattgcctgtagaatttcttttcgaaattctctgtgttggggcccctgactagaattgaaaaaagcttgttacaagcgcattttcgttcagtcaactactgccaatataacttcgtagagcatagaacattgatttatgtcccagcctgttttcataagccacagctaatgtgtatttaaaaataggaatacatgagtaaaactcatgcataagaaatactaatttctaaagaaaaagtatttctttatgttgggcccccccaacttgcacattattgtaagctgactttccgccagcttctgtgttggggccccgccaacttgcacattattgtaagctgacttaccatcagcttctgtgttggggccccgctataattgaaaagtttgttataggtgtattttcttttggttaactattgttaatataacattgtagattttaggatgttgatttttgacttagcctttgtctgcttatgttaaatgttccagctagtcaaacattgagtttgtaattattatattaagctagtttaaattttttgtgatttatgttttattcataccaattttgtgaaatgatacagtgacagatgtttattgattttaaagggtgatgatgatggctattgtaaataaagtgataattgttgaaggaaaatctgataaaaaaagggtgcaacaggttattgcagaaccagtcaatattatttgtactcatggaacaatgagtatagataagcttgatgatatgatagaatcactgtatgataaacaagtttttgtattagccgattctgatgacgaaggagatcgaattagaaattggtttaaacgttatttgagtgaaagtgaacatatatttattgataaaacttactgtcaagttgcgaattgccccaaacaatatttggcgcatgtactttcaaaacatggctttacttgtaagaaagaaacacctcttttaccgaatataaataatgaaaggttagttttagtaaatgaataattcattagacatcaaagatgtaactacattttatgaggaagacaaacatttaatctttggttatacaccaacgtgtggtacttgtaaggtttcagaaagaatgttagacattgctaatgaaatattgcagttaccattattgaaaatagatttaaacttttatcctcagttttgtaaagatatgcaaatcatgtctacgccgattttattgttgatgaataaagataaagaagtaaaacgaatttatgcatttaaatcggtgactgatttgttagaaaatttaaaatagttattgacgaaattttactaaggtgttaggattaatacaaattaaatgatgcgtaaactcttatcgagagtggtggagggatgtgccctacgaagcccggcaaccgtcttatatagaaatggtgccaattcacataaagttttaacttttgaagatgagagaaacaatactactattgctttctcaatttttctatcgatattgagaaagcattttttattttattaagcaacacagggaggaatcaacgtgattgaattaaaagaagttgttaaagaatatcggactaaaaataaagaagtccttgctgtagatcacgttaatttatcgattcgagcaggatcgatttatggcgtcattggtttttctggagcaggaaaaagtactttgattcgaatgtttaatcatttagaagcgcctacatcaggtgaagttattatagatggagaccatataggtcaattgtccaaaaatggattaagagcaaaaagacaaaaagtaagtatgatcttccaacattttaatttgttatggtcaaggactgtgttaaaaaatattatgtttccgcttgaaattgcaggtgtccctagaaggagagctaagcaaaaagcattagaacttgtcgaactcgtcggtttaaaaggtagagaaaaggcttatccatcagagttatcaggtggacaaaagcaacgtgttgggattgcacgagcgttagctaatgatccaacggtcttgctttgtgatgaggcaacaagtgcacttgatccgcaaacaacagatgaaattttagatctactactaaaaattagagaacaacaaaatttaacaattgtactaattacgcatgaaatgcatgtcattcgtcgtatttgtgatgaagttgcagttatggaaagtggtaaagtgatagaacatggaccggtgacacaggtttttgaaaatccgcaacacactgtgacaaaacgatttgtgaaagaagatttaaatgatgatttcgaaacatctttaacagaattagagccattagaaaaagatgcttatatcgttagattagttttcgctggttcaacaacaaccgagcctattgtatcgagtctatcaactgcctatgatattaaaattaatattttagaagcaaatattaaaaatacaaaaaatggaacagtcggctttttagttctgcatattccatatatttcaagtgtagatttcggaaaattcgaaaaagagttaattgagcgacaagttaaaatggaggtgttaagacatgggtaaatcatttagtgaaattataaatgaaatgattacaatgcctaatattcagtggccagaagtttggactgcaatagtcgaaacactatacatgacagtcgtctcaactatatttgcatttatactcggtcttattttaggtgtgttattattcttgtctgctaaaggtaagtctatcggtgcaaggttattttattctatcgtttctttcattgttaacttatttagagcgataccatttattattttaattttattattaattccatttacaagtttgatacttggaacgataagtggtccgacaggtgcgttaccagccttgattattggcgcagcaccgttttatgcaaggctcgtagaaattgcttttaaagaaattgataaaggtgtcatcgaagcggcctggtcaatgggtgccaatacttggatagtaattcgtaaagtcctcttacctgaagccatgccagcgctagtgtctggcattacagttacagcaatcgctttagttggttcaacagcagttgcaggtgtaattggtgccggtggtttaggaaatttagcatacttaacaggtttcactcgaaatcaaaatgatgtcattttagtatcaactgtttttattttaattattgtatttataatccaattcattggggattggcttacaaataaacttgataaacgataaattggggggttcattttatgaaaaaattatttggtcttattttagtattaacatttgcagttgtattagcagcttgcggtaatggaaacaaaagtggcagtgacgataagaaaataacagtaggtgcttcaccagcaccacatgctgaaattttagaaaaagcaaaaccattattagagaaaaaaggttatgacctagatattaaaacaattaacgattacactacgcctaataaattactagataaaggtgaaattgacgcaaactatttccaacatacaccatatttaaacacagagaaaaaggataaaggttacaaaatcgtaagtgccggtgatgttcacttagaacctatggctgtatactctaaaaagtataaaagtttaaaagaattaccaaaaggtgcgacagtttatgtgtctaataatccagctgaacaaggacgcttcttaaaattcttcgttgatgcaggtttaattaagatcaaaaaaggcgtaaaaattgaagatgctaagtttagtgatattacagagaataaaaaagatattaagtttaataataaacaatcagcagaattcttacctaaaatttatcaaaatgaagacgctgatgctgttatcattaattcaaactttgcaatcgaacaaaaactaaatcctaaaaaagattctattgctgtagaaagtgcgaaagataatccttatgcaaacttaattgctgttaaagaaggacatcaagatgataagaaaatcaaagcattaattgaagtattacaatctaaagatattcaagacttcattaatgaaaaatacaacggtgcagttattcctgctaaataaatcatattaatggctcagtaacgtgatgttgctgggctttttaatttaaacaggtatttatatgatatttaggaatgagatgctattacggataaagtaaaatcctatatgcatgcgtgctactcatttattcttatttttaatttcacatggatagtgactactacatcataaatcattagtgattctttattatttcagtcccactccctcaagttaatgatgaatctatttcgctagttataaaatgacgtcaaatcaatatcaaaaattatttaagtaaaatgtttagataatttttcagtgggtaagtattatatataacatttaattattccgaggaggcatttattatggcagacgaaagtaaatttgaacaagcaaaaggtaatgttaaagaaacagtaggtaatgttactgataataaaaatttagaaaacgaaggtaaagaagataaagcttctggtaaagcgaaagaattcgttgaaaatgcaaaagaaaaagcaactgattttattgataaagtaaaaggtaacaaaggcgagtaattttacttttttattcctaatacactgcacatgccacttagtcggtataaccatcggctaggtggtttttgtattaaaaaagtggataccaaaatttattaataattattttaatgttagaaaaaaactaaataaaaactcgctaatgatatccaataatatgtatacaaaacgagacatatattgcatatgattaacgagatactgaatatattttatcacccctaaaatgattattcattttcagcggtaattcgacctaaagtcaaacttacaataaaaccgatgataaatactactaatgaaacgaaccacatcacgatattagttggtaaacctggaaatactgcaaagagggagccaacaacaaaaccaatgattaatgcaaaagtcattagtttatgatgtgttaggaaatactggataattttgcttgaaataatgaatccagcaagcaccccaaatccgactgcaagtagtataggaagaccggtaaagttaagtttaacaacttcagatattgctagcatgaccgtaccatagacgccaaatactaataacataaatgatcctgaaatacctgggagtaacatagcgctagatgcacacatacctgcaataaagtatttaataataagaccagttgatagagtaagcgtttctccagcatgtttatcaccattattcattaatgtaataacaattaagatagcgataccagctataaccatcatgtaatgtttagttgtaaatgacgttttatagttagaaattttcaataaatatggaacgataccaatgattaatccaccaaagaaaaacatagttggaatatggtgttggcttaataaataattaaaaagattacttagtgatcccattgccagtaacattccaattataatggggattaaaaatgtaaaacttggccaaaaacgtcgtgagaatatgccgctaattgaagcgataaattgattgtaaatacctaacaataatgcgatagtcccaccgctaacaccaggtaccaagtcactcgttcccatagcaaaaccttttagaatattaatccatttaaattgttgcatgaataactcctttcaaacgattggaataaaatcataaatagcatcataccatattacaaatgtcctagtgaaatgataacatattttaaattcataaaatccattgagaaattatgtgcacttattatcatttatatttttaaagagagcggattagagttgtactttagagttattaaaaataataaaaagggtttaagttgtttatattaaggtataagtaagttataattaactgaacgcattattacaaagtctttttgactacaaattaaaattattataaactagttaagaaaactttatattttacggagggaatataaaatggcatcaacattagaaatcaaagacctacatgtgtctattgaggataaagaaatcttaaaaggtgttaacttgacaattaacactgatgaaatacatgcgattatgggaccaaacgggacaggtaaatcaactttatcatctgcaattatgggacacccaagctatgaagtaactaaaggagaagtacttttagacggtgtaaatattttagaattagaagttgatgaaagagcaaaagcaggattattcttggcaatgcaatatccatcagaaattacaggtgttacaaatgctgatttcatgcgttcagcaatcaatgcgaaacgtgaagaaggacaagaaatcaacttaatgcaatttattaagaaattagataaaaacatggattttctagacatagataaagacatggcacaacgttatttaaatgaaggtttctcaggtggagagaagaaacgtaacgaaatcttacaattaatgatgttagaacctaagtttgcaatcttagatgaaatcgattcagggttagacatcgatgcattaaaagttgtatctaaaggtattaaccaaatgcgtggggaaaactttggtgcattaatgattacacactatcaacgattattaaattacattactcctgataaagtacatgtaatgtatgctggtaaagtcgttaaatctggtggtccagaattagcaaaacgtcttgaagaagaaggatatgaatgggttaaagaagagttcggttcagctgaataatcttattaatacagtatccatgagatgttcatctatatatgatgaaaatgaacatttatacgaaatagtaaatttcatcaagtaggaggaaaaagttatgacaactgatattttgaacatttctgaagaacaacttgttgattattctaaagcccacaatgaaccttcttggatgacagaattacgtaaaaaagctttgaaattaacagaaactttagaaatgccaaaacctgataaaacaaaattaagaaaatgggattttgattcttttaaacaacacgatgtaaaaggtgatgtttatcaatctttatcacaattacctgagtcagtaagagaaattattgacgtagatcattctaaaaacttagtaattcaacataataatacgattgcgtacacacaagttgatgataatgcatcgaaagatggcgttatcgttgaaggtttagcagacgctcttatgaaccatagtgatttagtacaaaagcactttatgaaagatgcagtaacagtagatgaacatcgtatcacagcgctacacacggcattagttaatggtggcgtatttgtttatgttcctaaaaatgtagttgtagaacatccagtacaatacgttgtgttgcacgacgacaaaaatgcaagcttttataaccatgttatcatcgttactgaagaaagcgccgaagtcacatatgttgaaaattacttatcaaatgcatctggtgaaggaaatcaattaaatattatttctgaagtgattgctggtgcaaattcaaatatcacatatggctcagtggactatatggataaaggctttacaggtcatatcattcgacgtggtattactgaagcggatgcctcaattaattgggcactaggtttaatgaatgagggtagccaaattattgataatacaacaaatttatttggtgatcgttcaacaagttcacttaaatcagtagttgtaggtacaggagaacaaaaaattaatctaacatctaaaatcgtacaatatggtaaagaaacagatggttatatccttaaacatggtgttatgaaagaacatgcatcatctgtatttaatggtatcggctacattaagcatggtggaactaaatcaattgctaatcaggaatcacgtgtattaatgttatctgaacatgctcgtggtgacgcgaatcctattttattaattgatgaagatgatgtacaagctggtcatgctgcatcagtaggtcgtgttgatccagatcaactttactatttaatgagtcgtggtatttctcaaagagaagcggaacgtcttgttatacatggtttcttagatccagtagtacgtgaattacctatcgaagacgttaaacgtcaattgagagaagtaattgaacgcaaagtttctaaataatattttgaaaataaaagtttgtaatagatatagactgtcgatattggtataagactaatacaacgtcagtatttaaatgattaggatttttatttaagaaaggtcgtgaatgaagtggccgaacactcatttgacgttaatgaagtaatcaaggattttccgatattagatcaaaaagtcaatggcaaacgtttagcatatcttgattcaacagcgacaagtcaaacgcctatgcaagtgttaaatgttttagaggattactacaagcgttataattcaaacgttcatcgtggtgttcatacattaggatcattggcaactgatggttatgaaaatgcccgtgaaaccgttcgtcgttttattaatgcgaagtattttgaagaaatcattttcacacgcggaacaactgcgtcgattaaccttgtagcacatagctatggtgatgcaaatgttgaagagggcgatgaaattgttgtcactgaaatggagcatcatgccaatattgttccttggcaacagttagcaaagcgtaaaaatgcgacattgaaatttataccaatgacagctgacggtgaattaaacatcgaagatattaagcaaacgattaatgataaaacaaagatcgttgctattgcacatatttctaatgtactcggtacaattaatgatgttaaaaccattgcagaaatagctcatcaacatggcgcaattatcagtgttgatggggcgcaagcagcaccacatatgaaacttgatatgcaagaaatgaatgctgatttttatagttttagtggtcataaaatgcttggaccaacaggtattggcgtattatttggtaaacgtgagttactacaaaaaatggaaccgattgagttcggtggtgacatgattgattttgtaagtaagtatgatgcaacatgggctgatttacctactaaatttgaggcgggtactccattaattgctcaagcaattgggcttgcagaagctattcgctatttagaacgcataggttttgatgcaattcataaatatgaacaagaattaacgatatatgcttatgagcaaatgtctgcaattgaaggaattgaaatttatggcccgcctaaggatcgtcgtgcaggtgtaataacgtttaatttacaagatgtacatccacacgatgttgctacagccgtagatacagaaggtgtagcggttagagctgggcatcattgtgcgcaaccgttaatgaaatggttaaatgtgtcttcaacagctagagcgagtttttatatatacaacacgaaagaagacattgatcagttaataaatgccttgaaacaaacgaaggagtttttctcttatgaattttaataatctagatcaattatatagatctgtcattatggatcattataaaaatcctagaaataaaggtgtattagataacgggtctatgacagtagatatgaataacccgacatgcggtgaccgtatacgactaacatttgatatagaagacggcattataaaagatgctaagtttgaaggtgaaggttgttcgatttcaatggcaagtgcatcgatgatgacacaagctgttaaaggtcattcacttggagaagcaatgcaaatgagccaagaatttacgaaaatgatgcttggtgaagactatgtgattacagaagaaatgggagatattgaagcattgcaaggtgtatctcaattcccagctcgtattaaatgtgccacattagcttggaaagcattggaaaaaggtactgttgctaaagaaggtaaagcagaaggtacgactgaagaagaatagaatgctgttaatcatagatgattttgatattagacatataaaagtataaaaatttttataagatgtcatgtcattgttataatatggtttacatcatgaattaaaaacttacgcacgccgttgtaaatatatttttaaggagtgattgaaatggctaaaaaagcacctgatgttggggattataaatatggattccacgacgatgatgtatccattttcagatcagaacgtggtttaactgagaatatcgttagagaaatttctaacatgaaaaatgagccggaatggatgttagatttccgtcttaaatcattaaaattgttttataaaatgccaatgcctcaatggggtggcgacttatcagaattgaatttcgatgacattacttactatgtaaagccttcagaacaagctgaacgttcatgggatgaagtgccagaagaaattaaaagaactttcgataaattaggaattcctgaagctgaacaaaaatatttagctggtgtttctgctcaatatgaatctgaagttgtttaccataatatggaaaaagaacttgaagaaaaaggtattatctttaaagatacagatagtgctttacaagaaaatgaagaattattcaaaaaatactttgcttctgtagtacctgcagcagataacaaatttgcggcgttaaactcagcagtatggtcaggtggttcgttcatttatgtacctaaaaatatcaaactagatacgccactacaagcttatttccgtattaactctgagaacatgggtcaatttgaacgtacattaatcattgctgatgaaggtgcttctgtacattacgtagaaggttgtactgcaccagtttatacaactagttctttacactctgctgttgtggaaatcattgtgcataaagatgcgcacgttcgttatactacgattcaaaactgggcgaacaatgtatacaatttagttacaaaacgtacttttgtttatgaaaacggaaatatggaatgggtagatggtaacttaggttctaagttaacgatgaaatatccaaactgtgttcttttaggtgaaggtgcaaaaggtagtacattatctattgcatttgctggtaaaggacaagttcaagatgccggtgctaaaatgattcataaagcgccaaatacatcttcaacgattgtttctaaatctatttctaaaaatggtggtaaagttatttatcgcggtattgttcattttggacgtaaagcaaaaggtgctcgttcaaatattgaatgtgatacattaatcttagataacgaatcaacatcagatacaattccatataacgaagtattcaacgatcaaatatcattagaacatgaagccaaggtttcaaaagtttctgaagaacaattattttatctaatgagtcgtggtatttctgaagaagaagcgacagaaatgattgttatgggattcatcgaaccatttacaaaagaacttccaatggaatacgcggtcgaaatgaaccgtttaatcaagttcgaaatggaaggtagtattggatagctttaaaccgcgttgttaagccattcttaacttccagaaatggccattgataccattttgataccatttacttgtcaaaaatggctattgcatcgtgttttttctgagtatataaatggctgtaagtgcccatcgtttcagtgatttgagcatgtctcatgagtgactgtaaaacgaaaatatctacaccattatttgcaagataagatgcataagaatgtcttaacgcgtgaatgttataatgggggaaagctttttggaatttcttttgaacatgactgtaatgtttgggagccattcctccgaaaataaaataactacgttcatcaaaatatttatttaactctttttcacgttggtgtcgttcagttaacattgtattgatgaatttaggtaaaggaacaatatcctctgaactatctgtttttggtctcggaaatatagttctattagagatgtccattgttttatttatggatatctcttttttgtatttattgtagtctgtccaaacaagagccatagcttcgccaatccttaaacctgtataaaacattaatgtaaataactctctgtaatcttgctcttcaatgtctttgattctttcttcaaattcttcacgcatcataaacttaggttttggctttacacgcggaataggtttaattgatattgttggatctgtacgtaatccaaagtattttttggcataattaattacaactttaaaacctgaccaaattgtacgagcagaatttgttgacgctacattctctattagatatttacgaaactcttggcattgattttgcgttatcttattcatttttatgtgcccgaacttagctttaaagtgtttatgatattcattttgtttgcgtcgttttgttttaggtctcaaatcgctattttctaaatagtgatgaaaaacataatcaaatgtttttgaatcgctatatccttcgtttacgtcattcaaaaagatagcctctgctctcttagcttcacgcttagttgaaaaaccgcgttgcatcttacgtttgttattaccgtatacatctttatatctaatggaaaaataccatttacctgtattatcatccttatatactggcattttgcttctccctcctcaaaattggcaaaaaaataataagggtaggcgggctacccgaaatttagtactaggtactaaatgtgatataataaaataaaaagtaggtgatgaaatgtgcgtaaagtttactgacgcagaaatagcttatataaaagaatcagttgaaaattatagtagtgaatttgatatttatgacgatgaacaagaacttaaattaaaaatttatgaacaaattatgttaaaaatagagtccgaatacaaggatatctatttattccgtcttattaattgatttactgtattcggttaatattctttcgttttcatcaacgatgtcctttagtgtgtttaaaaggaagtcgcaatcacctttggctactgcaccggcttgtgaatggttgattatatttctcatactataagcaatttctacccgttttttggttctataattcactttaccctctttagttaattctcctaataatttggtgtacatagttgaatcggtgtctttatgtttgattttattcactttttttaatttgattaaaaacgtctctatagcaacagcaaaggttgctgcagctggcaaatacaactcccttttataagcttgtaatccttgttctatttgataagaaaaagttatatcatcaacaatctttttcatgctatttaaatctaagtggttgaacggttgtatttcatcatgtgctttgtttatcaatttctctttcgacttcgatatcaatgtattgtaatgatcgttagctaatcgtttgccataattaaaaaataaatctaaattgttttgtattattacagtcccgatatattttccgtagtaaatagacgtgtaataaatgtagttattaaaatctaataatccggattgttcttctacatactttttagaatcatatatgtatgaagtaaagtgtttagacaaatgtttgatatcagtattacgaaaattatatatttcttttaatttactgtcatttgagataacaacgatgcaaggttcttcaaaaaaagattgatttagataaaatatcgaaatcttgtaatcgtcttttctcatgaatgggaaggcttccggattactactaaactgataaatgtatctgttttcaactacatatttgtaaccttctaaaaaattacgcaagtattcttttaaagttttattctcttccatccctcatcctcctcacgccacacaagcgctattaatcaatatccaataattgttgttttttcttatcgaactcttcctgagaaattactccgacatctaataattctttatattttattaattcatcagcaacagaaaaactcattttttcagaattggatggtttcatagaactttctcgaatagagatttgttcttgtattgtttccgccattctagatacagtgttttttgatatgcttcctatagcgatacttgatgaaccgtgatgtataattatttcgccaaaaagaagtccttttttatacgaaacagaattgattttctcgaatggaaattcatgaaatttcaaaccatatatcatacctttatctaagaataacaatcttagatcagtacatactattaagtaggtattattattgtacaatcccgaagttacatacattatgttttcattatcttttaaaatcataggtagttctttcacttctttttttgtaccaaacaaatcctctacacctatttcgctaaatctttggtagattttagataagttttcgtcagatttattgatttcactttcaaatttcacttcttttctaggtttactttggtattcttttaaaatttctcttttgtcttcaacagatagttgcttgtattgtttcttttcttcttttgttttagttgctaaatattgactctcaatcatactttctttgaacgttaatctgctcttaggtaattctttcatgttcatttctcctttattttttgattgttaaatcgttagatcataagcatatttaaattcatttataaaatcagatttgctttccattttctcttctaaaaaacttaagtagttttctgcgtggtaattttcgttatttgacatatagtcgtttaacccattgtgtatatgtcttctgattacttttaccgctatatggatcgcttgaaaactcatttgatacttgtacgaaatttgctcaatattaaagttgtttatatatttgtatcttatatgtaaaggaaacaataaacatgaagcaaatgagtttgcttcatattcttcagcaatccttctataataatctttatatgtgaatgttttatttaaattaactccagtatgtcccattataaaatgaccatattcatgagctaaagtaaatcttagacgattcataggcagtaaatcgttataaactataatcgctttgtctccttttctaatatgaaacgcttcttctgaaccgaaaatagaaggtattttaaaatataaagtgccagtattctgagaaaattcagagaaagtcactaatttaatacgtttatcttttgagataatttcaaatatatctaaaggaaaagataagttatatagaccatttgtgatctcgtaaactgctttcgcagatttaaaaaaagatttttcataatttaatttcaattaaaaagcccctttgttacttagttaaatcatcccaatcatcaaacattgcttctaatatagtcaaagctttttgcctttgtgcctccgtcatattttctgtagctcgatgcataataagaatatcttcacttttatcttctccggagtactcatctttttctctacctaataagtaatcaactgatacatcgaagtgatcggcaattttttgcaccttatcaatgcctggtttggttttctcccatcttctgatttgtccgtttgaaaaccctaaagttctctctaattcagcaaaagtcataccttttgaattgcacaaattacggattctttgtactagattcataaatttctcctatcacagattaactttttcgctatttttgttgacaattagcataaaagttaatatactgtatttaagctttaaatttagcttactaaacacataacaattattcgttggggaacgagtattcaatacctttatgacaggcattacgaattgttataggtttattaaactatgcttaaatattagcataaaagttattggtgttcaacagataatttatttgcttagaaaaaatgttataggaggtgctaatatgtcgacaacagatttcggcttgaaagtgagaacggaattattaaaacgcaacatgacaaacaagcaacttgcggaaatgctagaaatttcaagtgcttacttatcggatattttacgtggacgtagagatgcttttgaacaaaagaaacgtattgcgaaaattttagaaattaaagaagaggtgaagagttaatgaatgaaattaaaactttcagtaacgacatgttttcaatcttaatcaaacaagataatgaaaataatttattcgatttagaaactgtcgcaaaaagtttggggttcactcagtttaaaaacggcaaacaatatattcgttgggaaactatcaataaatatttaggtaaatatctttcccaagaagttgggaaaggcgatttcataccagaaccaatggtatataagttggctttcaaagcaggtaatgctgtagcagaaaaatttcaagattggttggcgatggaagtcctaccagctattcgcaaacacggtatctacgcaacagacaatgtaattgaacaaacattaaaagatccagactacatcattacagtgttgactgagtataagaaagaaaaagagcaaaacttacttttacaacaagaaatcggagaactaaaacccaaagcagactatgtagatgaaatcttaaagtcaactggcacattagccacaactcaaatcgcggcagactacggtatatcagcacaaaagttaaacaaactactacacgaagctagactacaacgaaaagtaaataaacagtgggtgctttactcagaacacatgggcaagagttacacagattcagacactataacaattgtgcgttctgatggcagagaagacacagttttacaaactagatggacacaaaaaggcagattgaaaatacatgaaatcatgactgaattcggttatgaagctaatttagggggagcgtaaatgacaccagaacaaaaagaaaagctaaacaatatagtattaacactttatgcagttaaagaaaacaaaagtcaaacatacacacacaaagatactcttactgtgacatatgcaggcgagattgagcacacttacgaagtcgacagagagaaacaccttgaatcaatgattgagtgggcaattgaccaaatcgaacagcactttgatttagacgaagaagaataacacacaattgaacaaacaacttaataggaggaattatcaatgaacacactatataaaacaaccctcctcatcacaatggcagttgtgacgtggaaggtttggaagattgaacgaaatacgagaaagcctgtaatcaatcggaatgattttagtaaagagtctacagcagaaacgattgagcgacacagtgatcctgattcaggaataaaactacttaaggcattttccgacttcactaaacaagctgaaaagcaaaaacctacactaggagaagtttatagacggaacaaacctgaattaccaaccgttactttagacgaaaacggactgtttataaatgattttagggtgccttatgtacttgaggaaggggttaacgtaaagaaatctatgaacaacctatataaggtcagtttggactttttcgctaaaagtattattgcagataattacgaagcagataacccagagaatcaacagttattttaaaggaggaaaagatatgatgaaaaatagtttgcaagctaaagaacttgcggtaattttatctgtttctaaatccaaagcaggacaaataataagagaactgaataaagagcttgaagatgaaggatacattgcgatacgaggcagaataccagtccaattagctaggaaaaaattcccttatcacgacttatcagaccagagaataatggaggagttgaaaaaagaaaatgagtaacatttataaaagctacctattagcagtactgtgcttcacagtcttagcgattgtactcatgccgtttctatacttcaccacagcgtggtcaattgcaggattcgcaagcatagcgacattcatattttataaggaatacttttatgaagaataaaaaaaactgctacttgcgccaacaagtaacagtatcaagtacttaagaaaaatttcaagttaaatataaaacgaaacaaggaggaagtcaactatgactaaaaattataaagacatgactcaggacgaaataaaagacttattatctgaaaaaagcggagaattgtatgaattagcgaaagaaattaagggagaaagtaaatttgatattttgcttttctcatcaataggagttatcgacggagattatttagcaggttcaaattctgtgattggtcatactttcgatcttgcttccttattggatagcactaagagttataaagacattgtcaatgttctccaaatgtgtaaatcacaaaaatttctcggtattgatgacgacaaggaggactaaaacaatgtattacgaaataggcgaaatcatacgcaaaaatattcatgttaacggattcgattttaagctattcattttaaaaggtcatatgggcatatcaatacaagttaaagatatgaacaacgtaccaattaaacatgcttatgtcgtagatgagaatgacttagatatggcatcagacttattcaaccaagcaatagatgaatggattgaagagaacacagacgaacaggacagactaattaacttagtcatgagatggtaggaggtcgctatgaagcagactgtaacttatatcattcgtcatagggatatgccaatttatataactaacaaaccaaccgataacaattcagatattagttactccacaaatagaaatagagctagggagtttaacggtatggaagaagcgagtatcaatatggattatcacaaagcaatcaagaaaacagtgacagaaactattgagtacgaggaggtagaacatgactgaacaaacattatttgaacagttgaacagtaaaaacgtgaatgatcatacagaacaaaaaaatggattaacttatctagcatggtcatatgcacaccaagagctgaaaaagattgacccaaactacacagtaaaagtacacgagtttccacatccagatattaacacagaaaattattttgtaccttatttggctacaccagaaggctattttgtacaggtatctgtgactgtgaaagatagtacagagactgagtggcttccagtattggactttagaaataaatcgcttgctaaaggtagtgcaacaactttcgatattaacaaagcgcaaaaacgatgttttgttaaagcttcggctttacacggtttaggcttatatatctacaacggcgaggaactaccaagtgcaagtgacaacgatattacagaattagaagagcgtatcaatcagttcgtgaacttatctcaagaaaaagggcgagatgcaactatcgataaaacgatgagatggctaaaaatatctaacattaataaattaagtcaaaaacaaatcgcagaagcacaccaaaaattagatgcgggattaaaacaattggatagtgaggagaaacaataatgttaaacagagcagtattagtaggacgcttaacaaaagacccagaattaagaagcgcgccaaatggcgtaaatgtaggtacattcacattggcagtaaacagaacattcacgaatgctcaaggcgagcgtgaagcagattttataaacgtagtagtgttcaagaaacaagctgaaaatgttaaaaactacctttctaaagggtcgctggcaggtgtagacgggcgactacaaacacgtagctacgaaaataaagtcgggcaacgtgtatttgtgacagaagtagtagcggacagtgttcaattcttagaaccgaagaataacaaccaacaaccaaacaacaattatcatcaacaaagacaaactcaaactggtaataatccttttgataataccactgcgattactgatgatgacttaccgttctgattggaatgattaaatgccgaaaattactagttatatcactcaagacgacggcacaacaacagttgtcatctctgatgttgaattaggcaataaagaaacattactacttgataacgggtttgatgtagaagtagatgtaaacgttatagatccgtttcaaattaccggcaagcaacgtcgaaaaatattcgcgcttgtcaaagacatagaagaacatacaggtcaaccaatggactatatgagacatatgttcatcgagtttgtaagaacgtactacggctatgatgaacgtatttcgctaagtaattgtacgagaacacaagcaagtcaaatcattgaagcaacgcttgactggacgttctacaatgacataccacttagctacaaaacgagtaatctactgaaacaagataaatcattcttatactggtcaactgttaaccgcaactgtgtaatatgcggaaagcctcacgctgacctagcgcattacgaagcagtaggtagaggcatgaacagaaacaagatgaatcactacgacaaacatgtattagcgttatgtcgcgaacatcataacgagcaacatgcgattggtgttaagtcatttgatgataaatatcaattgcatgactcgtggataaaagttgatgagaggctcaataaaatgctgaaaggagagaaaaaggaatgaatagactaagaataataaaaatagcactcctaatcgtcatcttggcggaagagattagaagcgctaaaaaaattaaaaaatttacccctgaggattctaaaggttttcctgatataacaaaagattcaataaaagaacctaaataaaaatattatggttgataaaatcccattgttcttttgttaaccacccttgtttgttattgactatttctgtaacaaacagcttatctccagaatcgagataaggtttcaacttttctatcatttctgaagttgataaagaagaacggaataaaaatgaagatttccaataattgcaatgaccattagaaatttccttttttataacatttctcaattcctcatatttttgtccgggtgagtttaaatcatatgttaacatataaggtttttccatattttattcacccccaatctaacgcagtagcgataacaaaattataccagaaaggagataacgaaatggcaacatttagagtttacaaagaatcaggtaactttgtcacagtacacaaagattttatacatgattctaatataagttggaaggctaaaggtattctactttatttgttaagtcgacctgataactggcaaatttacgaaacagaactagagcaacattcaactgatggacttagcggtttaaagagtggaatcaaggaactggaagaaattggatacattcaacgtagtagaaaacgtgataaaagtggtaggttaaatggttatgagtacttagtatatgagcaaccgcaccacattcgattttccaacgttggaaaaaccgttaacggtaaaaccaacaatggaaaaaccgttaatggtaaatcgcatactactaataataatagtactaataatgatttaactaataataacaatactaataatgaaggaagtatattgtcgggcaacccgacggtgtcttccattccctataaagaaattatcgaatacttaaataaaaaagcaggaaagcattttaaacataatacagctaaaacaaaagattttattaaagcaagatggaatcaagattttaggttggaggattttaaaaaggtgattgatatcaaaacagctgaatggttaaacacggatagcgataaataccttagaccagaaacactttttggcagtaaatttgaggggtacctcaatcaaaaaatacaaccaactggcacgaatcaattggaacgcatgaagtacgacgaaagttattgggattagggggatattatgaaaccactattcagcgaaaagataaacgaaagcttgaaaaaatatcaacctactcatgtcgaaaaaggattgaaatgtgagagatgtggaagtgaatacgacttatataagtttgctcctactaaaaaacacccgaatggttacgagtataaagacggttgcaaatgtgaaatctatgaggaatataagcgaaacaagcaacggaagataaacaacatattcaatcaatcaaacgttaatccgtctttaagagatgcaacagtcaaaaactacaagccacaaaatgaaaaacaagtacacgctaaacaaacagcaatagagtatgttcaaggcttctctacaaaagagccaaaatcattaatattgcaaggttcatacggaactggtaaaagccacctagcatacgctatcgcaaaagcagttaaagctaaagggcatacggttgcttttatgcacataccaatgttgatggatcgtatcaaagcgacatacaacaaaaatgcagtagagactacagacgagctagtcagattgctaagtgatattgatttacttgtactagatgatatgggtgtagaaaacacagagcacactttaaataaacttttcagcattgttgataacagagtaggtaaaaacaacatctttacaactaactttagtgataaagaactaaatcaaaatatgaactggcaacgtatcaattcaagaatgaaacacaatgcaagaaaagtaagagtaatcggagacgatttcagggagcgagacgcatggtaaccaaagaatttttgaaaattaaacttgagtgttcagatatgtacgctcagaaactcatagacgaggcacagggcgatgaaaataagttatatgacctatttatccaaaaacttgcagaacgtcatacacgccccgctatcgtcgaatattaaggagtgttaaaaatgccgaaagaaaaatattacttataccgagaagatggcacagaagatattaaggtcatcaagtataaagagaatgagaatgaagtttattcgctcacaggagcccatttcagcgacgaaaagaaaattatgactgatagtgacctaaaacgatttaaaggcgctcacggacttctatatgagcaagagctaggtttacaagcaacgatatttgatatttagaggtggacgatgagtaaatacaacgctaagaaagttgagtacaaaggaattgtatttgatagcaaagtagagtgtgaatattaccaatatttagaaagtaatatgaatggcactaactatgatcgtatcgaaatacaaccgaaattcgaactacaacctaaatttgggaaacaaagaccgattacgtatatagctgatttctctttgtggaaggatggcaaactggtcgaagttttagatgttaaaggtaaggcgactgaagttgccaacatcaaagcgaagatattcagatatcagtatagagatgtgaatttaacgtggatatgtaaagcacctaagtacacaggcaaaacatggattacttacgaggaattaattaaagcaagacgagaacgcaaaagagaaatgaagtgatctaatgcaacaacaagcatatataaacgcaacgattgatataagaatacctacagaagttgaatataagcattttggtgatgtggataacgaaaaagatgcgctggcagattacttatataacaatcctaacgaaatactagagtatgacaatttaaaaattagaaacgtaaatatagaggtggaataaatggcaagaattaccaaagaaacaaaaactgtaagcgacggttattcaagagaagaccgagaaacgacattgaactatgattacgaaaatcaagaatggattgcttactcatcggtaccgacacatattactagaatgacaaagttgtacggcgatgatgtagaggtattggaacgattagaatctgggactgcggtattggttagggcgaaactacctaaaagcgcaataggttttagaaaattaatgtctgaagagcgacgacaagaattatctgagagagcaaaaagagcttttggtcattagtgctcgtgaatatagggcgaaaaacgaccaaaaagacacactaatactttttaggataaataacatccggagaaaaaaacatgagctttaaaaattttaacacaggataaatacagaggtggaataaatgagtatcgtaaagattaacggtaaaccatataaatttaccgaacatgaaaatgaattgataaaaaagaatggtttaactccaggaatggttgcaaaaagagtacgaggtggctgggcgttgttagaagccttacatgcaccttatggtatgcgcttagctgagtataaagaaattgtgttatccaaaatcatggagcgagagagcaaagaacgtgaaatggctaggcaacgacgtaaagaggctgagctaagaagaaagaagccacatttgtttaatgtgccacaagtgcatccaagaggacgttatgcgtgctacctgatggaaaacgacatattcgtgaaagttaagaagtagatcatgacagataacgcacgcaaagaatacctaaatcaattctttggatctaagagatatctgtatcaagataacgaacgagtggcacatatccatgtagtaaacggcacttattactttcatgggcatatcgtgccaggttggaaaagtgttaaaaagacatttgatactgctgaagagctcgaaatatatataaagcaacatggtttggaatacgaagaacagaaggaactaactttattttagaggaggttatgaaagtgaactatgaaacagggttccaactaggtgtaatggaagctaggttgaagaagatgagaaaacaacgtgatgcgtgcaagaagcaacgtgatgagcttatcgtggatatagctaagttaagagagcgtaacgaagagctggagaacatgtggcgcacagtcaaaaatgaattgcttggaagatacgaattttaccgttttagacttaacgaactacagattgagagtagagcgaacaaggcagtagctataaacatgggagctaaaatcaacgcaagtgctatattgtaccgaatggacaaattagacggaacaaatgagttctacgaatttttaggacaaatggaggatgacactaatgaataaccgtgaacaaatagaacagtccgttataagtgctagtgcgtataacggcaatgacacagagggattactaaaagagattgaggacgtgtataagaaagcacaagcgtttgatgaaatacttgagggtttacctaatgctatgcaagatgcactcaaagaagatattgaacttgatgaagcagtagggattatgacgggtcaagttgtctataaatatgaggaggagcaggaagatgaaaaaatttaatgttcaaatcacatacactggcatgattgaagagactatcgaggctgaaagtttagacgaagcagaaaatgaggcgcatgatattgcgagaatggaagtgccatttgattgtgatgagtatgaaatttatgtagatgtggagcaggaaaatgactaacacattacaagtaaaactattatcagaaaatgctagaatgcccgaacgaaatcataagacagatgcaggttatgacatattctcagccgaaaccgtcgtacttgagccgcaagaaaaggcagtgattaaaacagatgtagctgtaagtataccagagggctatgtcgggctattaactagccgtagtggtgtaagtagtaaaacgtatttagtgattgaaacaggaaagatagacgcgggatatcatggcaatttagggattaatatcaagaatgatattgaaacgttagagatttgggatgatggtaactttagtcgaaatgttgctgggatagacggaaagtatgccccaccacatccatcagataaaattttatttatgaatggtagttatgtcataaacaaaggcgacaaactagctcaattggttatcgtgcctatatggacaccggaactaaagcaagtggaggaattcgagagtgtttcagaacgtggagcaaaaggcttcggaagtagcggagtgtaaagacatcttagatcgagtcaaggaggttttggggaaatgatacaatacttagttacaacattcaaagattcaacaggacgtaagcatacacacataactcgagctaagagcaatcaaagctttacagttgttgaggcagagagtaaagaagaagcaaaagagaagtacgaggcgcaagttaaaagagatgcagttattaaagtgggtcagttgtttgaaaatataagggagtgtgggaaatgacggatgttaaaattaaaactatttcaggtggagtttattttgtaaaaacagctgaaccttttgaaaaatatgttgaaagaacggtaaattttaatggttttatttacgtaagtaatataatcaaacagccaacgtatattaaaacagatacgattgaatcaatcacacttattgaggagcgtgggaaatgaatcagctgagaattttattacatgacggtagtagtttgatattacatgaagatgaattatttaacgaaatagtatttgttttggacaattttagaaatgatgatgactatttaacgatagaaaaagattatggcagagaacttgtattgaacaaaggttatatagttgggatcaatgttgaggaggcagacgatgattaatattcctaaaatgaaattcccgaaaaagtacactgaaataatcaaaaaatataaaaataaaacacctgaagaaaaagctaagattgaagatgatttcattaaagaaattaatgataaagacagtgaattttacagtcctatgatggctaatatgaatgaacatgaattaagggctatgttaagaatgatgcctagtttaattgatactggagatgacaatgatgattaaacaaatactaagactattattcttactagcaatgtatgagttaggtaagtatgtaacggagcaagtatatattatgatgacggctaatgatgatgtagaggcgccgagtgacttcgcaaagttgagcgatcagtctgatttgatgagggcggaggtgtcagagtagatgatgtggttagtcatagcaattatattactagtcatcttattgtttggtgtgatgttgcaagctgaacagttaaaaggcgatgtgaaagttaaagagcggtagatagagatattaagaagtagattgagacattttgaagattaaacatatttgtacggagggtattcatgactaaaaagaaatacggattaaaattatcaacagttcggaaattagaagacgagttgtgcgattatcctaattatcataaacaacttgaagatttaagaagtgaaataatgacaccgtggattccaacagatacaaatataggcggggagtttgtaccatctaatacatcaaaaacagaaatggcagtaactaattatctttgtagtatacgaagaggtaaaattcttgagtttaagagtgcgattgaacgtataatcaacacatcaagtaggaaagaacgcgaattcattcaagagtattattttaataaaaagactttgattgcggtttgttatgacatacacatctctgaaagtacagcgcatagaatcaagaagaaaatagtgtctaaactagccgaagaattaggagaatactaaatttgacagtaaaatgacagtttttgacacctataacgagatattatgatagtgtaggatattgactatcttactgcgtttcccttatcgcaattaggaataaaggatctatgtgggttggctgattatagccaatcccttttttaattttaaaaagcgtatagcgcgagagttggtggtaaatgaaatgaacaaattaactaaaaagcaacgtttgtttgcagaagtatatacaatacctggtactgaatgttatggcaatgctactaagtcagctgtgcatgccggatatagcgaaaagacggcgtactcacaaggacagcgtatgttgaagaatgttgaaattcagaattatatcaaggaggttgaaacaaaactctttgacgagaatattatgtcaggtaaagaagtgttgtataggctaactagaacagctagaggagaacacacggaagttgaagctgtcgtaacaaaaactggagactataaagagaatccggatactggcaaaatgcaattagtatacgatgaacacatacaacttgttactaagtcacctaaaataagtgaccaaaacaaagccttagagatgttaggtagacatcacaaattatttacagacaaacaagaagtcgaccacaaaataccgatgtttgttgataatattccggaagatgattagtcatgtatgaaatacttgatctaaaaaataaaatcggtggtggctacaataagttttggcacaacaaaaacttttaccgtgttgttaaaggttcaaggggtagcaagaaaagtaaaactaccgctattaatctcatttatcgaataatgaaatatgattgggcaaatatacttgtagtcagaagatttagcaacactaacaaacaatcaacgtatacagatttaaagtgggcaactaaccaattaggcgttgctcacttatttaaattcaacgaaagtttgccggaaataacgtataaacctactggacaaaaaatactgtttagaggtttagacgacccattgaaaataacatcgattactgttgatacaggcattttgtgttgggcttggtttgaagaggcttatcaaatagaaacattcgctaagtttagcactgttgttgagtcaatacgtggtagctacgatagtccggaatttttcaagcaaatcacagtcacttttaacccgtggtcggaaagacattggttgaagcctacattttttgatgaagaaacaaaattaaacaatactttttcagatacaacaacttatagagttaatgaatggctagataaagtcgatattgaacgatatgaagatttgtatataaagaatcctagacgtgcaagaatcgtttgtgatggagattggggtgttgcagaggggcttgtattcgataattttaaagtggaagactttgattggtttgaggagtttaaaagaacgcaagaaataactcacggaatggattttggatttagtcaagaccctacaacagttgttagtacggttgtagatttaaaaaacaaaaagttattcatctatgatgaacactataaaaaagcgatgttaactgatgatataaaacaaatgcttattaaaaaaggattaggtgatgtagatattgcagctgattatggggctggtggagatagagtgatcagtgaattgaaatctaaagggattaaaggtataagaaaagcgttgaaaggcgctaatactattttaccaggcattcaattcattcaaggctttgaagttattatacacccatcatgtgaacacgctattgaagagttcaacacttatacatttgaccaagataatgatggtaagtggttgaacaagcctatagatgctaataaccatattatcgatgcattgcgttatagtcttgagaaatatcatatcgtacgtaaaaaacgtaaaaagaatatagaaagcaaaacaaaagtaattaaatctctaggattataggagggaacaaatgttaaaggcaaacgaatttgaaacggatactgatttacgagaaaacagaaattacttgtttaacgatgaagctaatgttgtttacacatatgacgggacagagtctgatttattacaaaacattaatgaagtaagtaaatacattgaacatcacatggattaccaacgacctagattaaaagtgttaagtgattattacgaaggtaaaactaagaatctggttgagttaacacgacgcaaagaagagtacatggcagataaccgtgtagcgcatgattacgcatcttatattagcgattttattaacggttatttcttaggtaatccgattcaatgtcaagatgatgataaagatgtattagaagctattgaggcgttcaatgatttaaatgatgttgagtcacacaatagatctttaggattagatttgtcaatttatggcaaagcttatgagttaatgattagaaaccaagatgatgaaacgcgtttatacaagagtgatgcaatgagtacttttgtcatatacgacaatacaattgaacgtaatagtatcgcaggagttagatatttaagaactaaaccaatagacaagactgacgaagatgaagtgtttacagttgatttatttacttctcacggtgtttatagatatcttaccagtagaacaaatggattgaagctcacaccacgtgaaaacggttttgaatcacactctttcgaacgtatgcctattacagaatttagcaacaacgaaagaagaaaaggggattatgagaaagtaatcactttaattgatttgtatgataatgctgaatcagatactgctaactatatgagtgatttaaatgacgctatgttacttattaaaggtaatttaaatttagatcctgtagaagttagaaaacaaaaggaagctaacgtgttatttttagagccaaccgtttatgagaatagggatacaggtatcgaaacagaaggttcagttgacggcggttatatttataaacaatacgatgtacaaggtaccgaagcttataaagaccgtttgaacagtgatatacacatgtttaccaacacgcctaacatgaaagatgataactttagtggcactcaatcgggcgaggcaatgaaatacaaattattcggattagaacaacgtactaaaactaaagaaggattgttcactaaagggttaagacgtcgtgctaagttgttagagacaatacttaaaaatacacggtcgattgacgctaacaaagatttcaatactgttagatacgtatacaacagaaacttacctaaatcattaatcgaagaattaaaagcttatattgattctggcgggaagattagtcaaacaactttaatgtctctattctcgttcttccaagaccctgaattggaagtcaagaaaatagaagaagatgagaaagaatctattaaaaaagctcaaaaaggtatttataaagaccctagagacatcaatgatgacgaacaagatgatgatacaaaagatactgttgataaaaaggaatgattgtaattgcctaacaaaaacactcaagaatattgggaagaacgcggacgcaaagcaatcgagaatgagttgaagcgtgataaaactaaagctgaagaaatagaacgtatattgaatatgatgattaagcgcattgaaaaagaaatcaatgcgtttattgttaagtacggagattttgcaggcgttacattacaagaagcacaaaagattattgatgagttcgatgtaaaagcgtttcaagaagaagcaaaaagattggtcgaaaacaaggactttagcgatagagcaaatgaagaattaaagaagtataacactaagatgtatgtatctagagaacagatgttaaagattcaaatagaattcttaattgcttatgcaacagctcaaacagaattatcgatgagggaatatttcgaatcaacagcttatcgtgtgttcagtgatcaagcgggtattttaggtgaaggtgtacaagtagctaaagaagttatagatacaatcgttgatacacaatttcatggtgtcgtttggtcagagcgattatggactaatactgaagcgatgaaacaagaagtagaagaaataattgctaatgtggttattagaggtcgacatccaaatgaatatgttaaagatatgcgcaagcacctaaacaaattcgaaggcacagcaagacaaaagactgcagcaattaaatcattgctttatacggaatcggcacgtgttcacgcacaatcaagtattgacagcatgaaagaaatttcaccggaaggatattatatgtatattgcaaaaattgatagtagaacaactaaagtatgcaaggggcttaatggagaaatattcaaagttaaagacgctaaaattggtgttaatttctaccctatgcatatcaattgtcgttcagattgtgcattactacctaaatctatgtggccgaaaaaaccaaacaaaaaacgacaaacaaaatactttggaggaaaagtgaaaagcgatgattgatttaaaagtaaaagtttttaaaggcaagttagcattgtatgatagtaaattaagtgtttggaggatattggtatgagcaatactgacaaataccttagagacatagcaagagagttaaaaggtatacgtaaagagttacaaaagcgaaacgaaacagttattattgatgcaaacttagacagcgtaaggtcggcagtattagccaataaagaaaaaccgaaatataacgaaccactcttttaatagctagcacttaattgtgttggctattttttatgtccaaaacgtgctgatgacataaaaagcacgcatggaaaaacagtcgacagactataaatggaggtatatctcatggaagaaaataaacttaagtttaatttgcaattttttgcagaccaatcagatgatccggatgaaccaggtggagatggtaaaaaaagagatcctgataataaagaaaatgacgaaggtactgaaataactttcacgccagagcaacaaaagaaagttgatgaaatacttgaacgtcgtgtagcccacgaaaagaaaaaagctgatgagtatgcaagagaaaaagcagaagaagctgctaaagaagctgctaaattagcgaaaatgaacaaggatcaaaaagatgaatatgaacgcgagcaaatggaaaaagagctggagcaattacgctcagaaaaacaattaaatgaaatgcgttcagaagcaaggaaaatgttaagcgaagcggaagttgattcatcagatgaggttgttaatttagttgtaacagatactgctgaacaaactaaattgaatgttgaagctttttctaatgcagtaaaaaaagcggttaatgaagcggttaagattaacgctagacaatcgccattgactggtggagattcatttaatcactcgactaaaaataaaccgcaaaacttagctgaaatagctagacaaaaaagaattattaaaaattaacggaggcatttaaatggaacaaacacaaaaattaaaattaaatttgcaacattttgcgagtaacaatgttaaaccgcaagtatttaaccctgataatgtaatgatgcacgaaaagaaagatggcacgttgatgaatgaattcacaacgcccatcttacaagaggttatggaaaactctaaaattatgcaattaggtaagtacgaaccaatggaaggtactgagaagaagtttactttttgggctgataaaccaggtgcttactgggtaggtgaaggtcaaaaaatcgaaacatctaaagctacatgggttaatgctactatgagagcgtttaaattaggggttatcttacctgtaacaaaagagtttttgaattacacttattcacaattctttgaagaaatgaagcctatgattgctgaagcattctataaaaagtttgatgaagcgggtattttgaatcaaggtaacaatccattcggtaaatcaattgcacaatcaattgaaaaaactaataaggttattaaaggtgacttcacacaagataacattattgatttagaggcattacttgaagatgacgaattagaagcaaatgcgtttatctcaaaaacacaaaacagaagcttgttacgtaaaattgtagatcctgaaacgaaagaacgtatttatgaccgtaacagtgatacgttagatggtctacctgtggttaaccttaaatcaagcaacttaaaacgtggtgagttaatcactggtgatttcgataagttgatttacggtatccctcaattaattgaatacaaaatcgatgaaactgcacaattatctacagtcaaaaatgaagatggaacacctgtaaacttgtttgaacaagacatggtggcattacgtgcaactatgcatgtagcattgcatatcgctgatgataaagcgtttgctaagttagttcctgctgatgcaaaaccatcttcaaatccaggagaagtttaataaataattaggagtggtaacatgcccgaaatcattggaattgttaaagtagattttacagatttagaagataacagacatgtctatatgaaagggcatgtctaccctcgcaaaggttatgatcctacagatgaacgtatcaaagctttagctagtgttgaaaataaacgcaacgaacaaatgatttacattgtaaatgacaaattaaccaaaaaagaacttgtcgaaatagcaagtgttgctggcttacaagttgatgaaaaacaaacaaaagctgaaattatcaacacttttgagtcgctagagtaggtggttatatgactacgctagctgatgtaaaaaaacgtattggccttaaagatgaaaagcaagatgaacaattagaggaaattataaaaagttgtgaaagccagttgttatcaatgttacctattgaagttgaacaaataccggaaaggtttagttacatgattaaagaagttgcagttaaacgctacaacaggattggtgctgaaggtatgacatcagaagcggttgacggacgtagcaatgcgtatgaattgaacgatttcaaggagtatgaagctattattgataattactttaatgctagaacgagaactaaaaaaggaagggctgtgttcttttgagatatgaagatagagttatttttcaattagaacaagtagcaacttacaatcctaaaactagcaaaaaagaaaacacactaatcacttatgatgcgataccatgcaatattaaccccatttctagagcaagaaagcaacttgaatttggtgatgtaaaaaacgatgtaagtgttctgaggataaaagaatcaatatcttaccctgttagccacgtgttggttaatggcattcgctacaagatagttgatacaaggatatacagacacgaaacgtcatattatatcgaagaggtcaattgatgaatatagatggattagacgcactgttaaaccaatttcacgatatgaaaaccaacattgatgatgatgttgatgatattttacaggaaaacgccaaagaatatgtagtacgagctaaattgaaagctagagaagtaatgaataagggttattggactggtaatttatcacgcaatatcagatataaaaaaactggcgatttgcaatacactatcacatcgcatgcagcttatagtggtttcttagggtttggtactcgatacatggaggcagaaccttttatgtggccagtatatgaggtaataagaaaatcaactgtagaagaattgaaagcgttgtttgaataggagataaaagcatgacaccgaacttacaactttataataaagcgtatgaaatgctacaaggatatggattccctgttatttctcgtaaagagatgcaacaagagattccgtatcctttttttgtaataaaaatgccggagtcaaacagaagtaaatacacgtttgatagttattctggtgacacgaatttagttattgatatttggagtgtaagtgatgatttaggacatcatgacggacttgttaaaagatgtattgatgatttaacacctagcgttaaaacaaacgattatgactttgaagaagatgatactaacatcacacagttagttgatgatactaccaatcaagaattgatacacacatcagtaacgatatcttacaaaacattttaaaaaacggaggaatattgaatggcaaatatgaaaaatagtaatgatcgtattattttatttagaaaagctggcgaaaaagtagatgctactaaaatgctttttttaactgaatacggcttatcacatgaagctgatacagatacagaggatacaatggacggttcttataacactggtggttctgttgagtcaacaatgtctggtactgctaaaatgttttatggtgacgattttgcagatgaaattgaagatgcagttgtagatcgcgtattgtatgaggcttgggaagttgaaagtagaataccaggcaaaaatggagatgccactaaatttaaagcgaaatatttccaaggtttccacaataaatttgaattaaaagcagaagctaacggtattgatgaatatgaatatgaatatggagtgaatggtcgtttccaacgtggatttgcaacactacctgaggctgtaacaaagaaacttaaggcgactggatacagattccatgacactacaaaagcagatgcgttaactggcgaagatttaacagcaattccacaacctaaggtagattcatcaacggttacaccaggagaggtataaaaatagggcgttaagccctatttattttgtttaaattaatcatgaatggagattttaagttatgaatgtagaaattaacggaaagtcattagaattaagttttggttttaaatttttaagagaaatcgataaccgattaggtttaaaagttgaacaagcttctatcggtcaaggtgtatcaatgttgcctgtaggtttagaaagtggaaatccggttgtgattggcgaagttttaatcgcagctacatctcacttaaaaaaacaagcaattactattaataacattgatgaagcattagatgaaatcgcagaaaatatcggactagaagaattcggttcggatattttaacggagttgggaaagcgacctatgacccgaaacctagtcgaagtagtggaagcggaagagaaaccagcggaagcgtaatagcttacgacagaatcgttataacttgtatgtcaacacttggtattacagatttgaacgttattgagcaaatgacattaacagaatataactatcgaatgtatgcgaaagagtatgaaatgctaacccaagaattcgaacgttacaaacttgcgtttgctattcgtgatgctgcagctactaaaaatgttgggacagaaaataaacctaaagaggaatatgtttttaacaatgcaaacgacgtattgccttatgaagaaaatatccaacggcttaacgaaggtaaagatataagatttagcagcgaacgtgatgaatacgaaccacaaaataatgaattctttaaagttatagcagaatttaataagcaatagaaagagaggtgttaatgtgacggaatataaaattaaagcgactattgaagctagtgtagccaaattcaaaaggcaaattgatagtgcggttaagtctgtgcaaagatttaaacgagtagcagatcaaactaaagatgttgaattaaacgctaacgataaaaaattacaaaaaactatcaaggttgctaaaaagtctttagatgcctttagcaacaaaaatgtaaaagctaaattagatgctagtatacaagacttacaacaaaagatattagaatcaaattttgaactagacaaacttaactccaaagaagctagccctgaggttaaactacaaaaacaaaagttaactaaagatatcgctgaagcagaagttaagttatccgaactagaaaagaagcgtatcagtattgacgtcaatgcagataacagtaaattcaatcgagtgttaaaagtatctaaagctagtcttgaagcattaaataggtctaaagccaaagctattatagacgtggacaatggtgttgctaactctaaaataaaacgcactaaagaagagcttaaaagtattccaaacaaaactagatctcgactagatgtagatacagggctttctataccaactatttatgcgtttaaaaaatcattagacgcattgccgaacaaaaaaacaacaaaggtagatgtcgatactaatggtttaaagaaagcttatgcctacataataaaagcaaacgacaatttccaaagacagatggggaatttagctaatatgttccgtgtgttcggtactgtaggttctaatatggttggtggattactaacttcatcttttagtatcttaatacctgtaatagcgagcgtagtacctgtagtatttgcgctattaaacgctatcaaagtgttaactggcggtgtacttgctttaggtggtgcggtagcaatagccggcgctggctttgtagcatttggcgcaatggctatcagcgctataaagatgcttagtgacggcactttacaagctagctcagcaacaaacgaatacaaaaaagctttagatggcgtaaagtcagcatggactgatattataaagcaaaatcaatccgctatattcacaactcttgcaaacggtttaaatactgttaaaacagcaatgcagagcttacaacctttttttagtggtatttcaagaggaatggaagaggcgtctcaaagtgtgtttaaatgggctcaaaatagcggtgtagcatcaaggttcttcaacatgatgaatacaactggtgtttcggtatttaacaagctattaagtgctgcaggcggtttcggtgatggattagtcaatgtattcacacaattagcaccactgtttcaatggtcggctgattggttggatagattaggtcaatctttctctaactgggctaatagtgcagctggagaaaattcgataactcgttttattgaatacacaaaaacaaacttacctatcattggtaatatttttaaaaatgttttcgttggaattaacaatttgatgaatgcattcagtggatcatcaactggcattttccaatctcttgaacaaatgacagctaagtttagggaatggtctgaacaagtaggacaatctcaagggtttaaagactttgtcagttatatacaaactaatggaccactaataatgcaattaattgggaacattgcaagaggattagttgcattcgcaacagcgatggctcctatagctagtgcagtattacgcgttgcagtagcaataactggttggatagctaacttgtttgaggcgcatccagctacagcacaattagttggtgtcattataactttagttggtgcatttagatttttaataccgattattcttgctgtatctaactttatgggtggcggattaataggtagaatcattgcgttagtaagtaagttcggtttattaagagcgggattaacaattttaaaaggtgcgttcatgttattaaaaggaccattaaaaattatatcagttatattccaattgttattcggtaagattggattaattagaaatgctatcacaggactagtaactgtgtttggtattttaggtggtccaataacaatagttatcggtgtaatcgctgcattaatagctatattcgttttattgtggaataaaaatgaaggattcagaaactttattataaatgcttggaatgcgataaaaacgtttatggttacagtttggaatgtgttgaaaactgtagcttcggttgtatggaatgctattttaaaagctatcactacagcagtaactaatgtatacaattttataatgattgtttggaatcaaatagccgcttatttacaagggttatggaatggaattatcgctattgcaacaacggtatggaaccttttagttacaatcatcacaactgttttcacgacgataatgacaatagttatgacgatatggacagctatttggacattcttaagtacaatctggaacacgataattacaatcgctactacgatttggaatttgttagtcactgtaataactacagtatttaccacaattatgactatcgcaatgacaatttggaacgctatttggacgttcttacaaacgttgtggaacactatagttactgtggcaactaaggtttggaacgctatcactacaactatatctactgcgttacaagcggcatggagttttatttctaatatatggaatacgatttggagtttcttatctggtatattaacgacaatttggaataaagttgtaagcatattcacacaagttgtatcaactatatcagacaaaatgtctcaagcttggaacttcatcgtgactaaaggtatgcaatgggtatctactataacaagtacgctaattaactttgttaatagagttattcaaggattcgttaatgttgtaaacaaagttagtcaaggtatgacaaatgcagtaaataaaataaaaagctttataggagattttgtgtctgcaggtgctgatatgatccgtggtttaattagaggtattggacaaatggctggccaattagtagatgcggctaaaaatgttgctaagaaagctttagatgcagctaaaagtgctttgggtattcactcaccttcacgtgaattcatggatgttggtgtgtattcaatgctaggtttcgttaaaggtatagataatcattcaagtaaagttatccgtaatgtttctaatgttgcagataaagtagttgatgcatttcaacctacattaaacgcacctgacatttctagtattacaggaaacttaagtaatttaggtggaaatataaatgcgcaagtacaacacacacattctattgaaacatcaccgaacatgaaaactgttaaagttgaattcgatgtcaataacgatgcgcttactagtattgttaacggcagaaatgctaaacgcaattctgagtattacttataaaggaggttacaaatggacatagaattaacaaaaaaagatggtactgtaatcaaattaagtgaatacgggtttatcgttaacgatatagtaattgatagcatgcaaatcaacacaaagtatcaagacaaagaaaatatgaacggtcgtatattaatggggagcaattatatcagtagagatatagttgttccttgtttttgtaaagttaaaaatcgttcagacattgcttatatgcgagatatgttgtataggttaacgacagacatagaacctatgtatttacgagaaataagaagaaaagaagagttgaattacaggtttactcaaccaacttctgatgattacgtgaaattagataaaaacaacttcccggattatgaatattcaagacacgatcaacaaatttatgtaaatggtaaacagtataaagttatttttaacggagttataaaccctaaacaaaaagataataaagtttcttttgaactaaaattcgaaactacagaattaccatacggcgaaagtattggaacaagcctagagttagaagaaaacaaaaaggttggattgtggtcgtttgattttaatattgattggcatgcaggcggagacaaaagaaagtatacatttgaaaatttgagcaaaggtacagtttactatcatggtagtgctcctaacgaccaattcaacatgtataaaaagataacaattattttaggcgaagatacagaatcgtttgtatggaatttaacgcatgctgaaataatgaaaattgaggggattaaactaaaagctggagacaaaattgtttatgatagctttcgagtttataaaaacggtgtcgaaataagcactgaaacgaacatagcccaaccaaaatttaaatacggagctaataaatttgagtttaatcaaacagttcaaaaagttcagtttgatttgaaattttattataagtaggtgtcagaatgacaataattgtaagaccacctaaaggtaatggcgcacctgtaccagtagaaacaactttagtaaaaaaagttaatgctgacggtgtattaacttttgatattctagaaaataaatatacttatgaagttattaacgctatagggaaaagatggattgttagtcatgtcgaaggtgaaaatgacaagaaagaatatgtaataactgtcattgataggaaatcagaaggcgacagacaactggttgaatgtactgctagagagattcctatagacaagttaatgattgataggatttatgttaatgtaacaggatcttttacagtagaaagatattttaacattgtgtttcaaggtactggaatgctttttgaagtcgaaggtaaggttaagtcttcgaagtttgaaaatggtggtgaaggcgatacaaggttagaaatgtttaaaaagggattagaacatttcggtttagaatataaaataacgtatgacaaaaagaaagacagatataagtttgtattgacgccttttgcaaatcaaaaagcgtcttattttatttctgacgaagtcaacgccaacgctataaaactcgaggaagatgcaagtgatttcgccaccttcattagaggatatggtaattattcaggagaagaaacattcgaacacgctgggctcgtaatggaagctagaagcgcattagctgagatatatggcgatatccacgcagaaccatttaaagatggtaaagtgactgaccaagaaactatggataaagaattgcaatcgagattgaaaaagtcgttaaaacaatctttgtctttagattttttggtcttaagagaatcatatccagaagcagacccacaacccggagacatagtacaaataaaatctaccaaactaggtttgaatgatttagtccgtatagtacaagttaaaacgattaggggtataaacaatgtaattgttaagcaagatgtaacgcttggtgagtttaatcgagaacaacgatatatgaagaaagtaaatactgctgctaattatgtttctggattaaacgatgttaacctttctaatcctagtaaagcggcagaaaacttaaaatctaaagttgcatcgatagctaaatccacacttgatttaatgagtagaactgatctaattgaagacaaacaacagaaagtaagctctaaaactgtgactacatctgacggcactatcgttcacgattttatagataaatcaaacattaaagatgtaaaaacaattggaacgattggtgattctgtagctagagggtcgcacgcaaaaactaatttcacagaaatgttaggcaagaaattgaaagccaaaacgaccaaccttgcaagaggtggcgctacaatggcaacagttccaataggtaaagaagcggtagaaaacagcatttatagacaagcagagcaaataagaggagacctaatcatattacaaggtacagatgatgactggttacatggttattgggcaggtgtaccgataggcactgataaaacggatacaaaaacgttttacggtgccttttgttctgcaattgaagttatccggaaaaataatccggcttcaaaaatacttgttatgacagctactagacaatgtcctatgagtggcacaacgatacgtcgtaaagatacggataaaaacaaactagggttaacgttagaggattatgtcaatgctcagatattggcttgtagtgaattggatgtaccagtatatgatgcctatcatacagattattttaagccatataatccagcgttcagaaaatcaagtatgccagacggattgcatccgaacgagaggggtcatgaagttattatgtacgaacttattaaaaattattaccagttttacggatagaaaaggaggaagacatggataacaaattaattacagacttaagtagagttttcgattacagatatgtagatgaaaatgagtataatttcaagcttatttcagacatgctgactgattttaatttctctcttgaataccatagaaataaagaggtatttgcacataatggagagcaaataaagtatgagcatttaaatgtcacaagtagcgtctctgattttttaacgtatctaaacggccgtttcagcaatatggtactaggtcataacggcgacggtatcaacgaagtaaaagacgcgcgtgttgataatactggttatgatcataagacattgcaagatcgtttgtatcatgattattcaacactagatgctttcactaaaaaggttgagaaagctgtagatgaaaactataaagaatatcgagctacagaataccgattcgaaccaaaagagcaagaaccggaattcatcacagatttatcgccatatactaacgcagtaatgcaatcattttgggtagaccctagaacgaaaattatttatatgacgcaagctcgtccaggtaatcattacatgttatctagattgaagcccaacggacaatttattgatagattgcttgttaaaaacggcggtcacggtacacacaatgcgtatagatacattgatggagaattatggatttattcagatgtattggacagtaacaaaaacaacaagtttgtacgtttccaatatagaactggagaaataacttatggtaatgaaatgcaagatgtcatgccgaatatatttaacgacagatatacgtcagcgatttataatcctatagaaaatttaatgattttcagacgtgaatataaagcttctgaaagacaagctaagaattcattgaatttcattgaagtaagaagtgctgacgatattgataaaggtatagacaaagtattgtatcaaatggatatacctatggaatacacttcagatacacaacctatgcaaggtatcacttatgatgcaggtatcttatattggtatacaggtgattcgaatacagccaaccctaactacttacaaggtttcgatataaaaacaaaagaattgttatttaaacgacgtatcgatataggcggtgtgaataacaactttaaaggagatttccaagaggctgagggtctagatatgtattacgatctagaaacaggacgtaaagcacttttaatcggggtaactattggaccaggtaacaacagacatcactcaatttattctatcggccaaagaggtgttaaccaattcttgaaaaacatcgcgcctcaagtatcaatgactgattcaggcggacgtgttaaaccgttaccaatacagaacccagcatatctaagtgatattacggaagttggtcattactatatctatacgcaagacacacaaaatgcgttagatttcccgttaccgaaagcgtttagagatgcaggttggttctttgatgtactgcctggacactataatggtgctctaagacaagtacttaccagaaacagcacaggtagaaatatgcttaaatttgaacgtgtcattgacattttcaataagaaaaacaacggagcatggaatttctgtccgcaaaacgccggttattgggaacatatccctaagagtattacaaaattatcagatttaaaaatcgttggtttagatttctatatcactactgaagaatcaaaacgatttactgattttcctaaagactttaaaggtattgcaggttggatattagaagtaaaatcgaatacaccaggtaacacaacacaagtgctaagacgtaataactttgcttctgctcaccagtttttcgttagaaactttggtactggtggtaatagtggttggagcataatagaaggtaaggaggttgaataatggtagtagataatttttcaaaagatgataacttaatcgagttacaaacaacatcacaatataatccggttattgacacaaacatcagtttctatgaatcagatagaggaactggtgttttaaattttgcagtaactaagaataataagccgttatcaatcagcaaacataatgcgatgactagtattgtgcttaagacggataacttcgacgatgaacacggcgcttatattagtgatgaacttacaattgttgatgcaattaatggacgaatgcaatacgttatcccaaacgagttcttaaaatacactggtcgagtacatgcgcaagcatattttactcaaaacggtagcaataacgtaattgtagagcgtcaatttaacttcaatatccagaatgatctaattagtaattttgacagtaaaacaaagctagtttatatcaaatcaattcaggacttaacagaaagtgttaaagaagaagttgaggacttaaagaaaagtttgagtgatacaaaatcgttggttactgaaattgatagtcgtattaatcaaggtattcaaagattagaaatcaaacaaaatgaagcggtacagatgattacaacaacacaagacaaagccgttcaatatataaatagcgagttccagaaaattgttgataaagagcaagcgatttttgaacgtgttaacgaagttgaacaacaaatcaatggcgctgaccttgttaaaggtaattcaacaacaaattggcaaaagtctaaacttactgatgattacggtaaagcgatcgaatcatctgaacagtcaatagaagctgttttaagacacgctaactcatctatgattattcatattactaatgcaaaagatgcgccagaaaaggcggatataggcacgttagagaagcccggacaagatggtgttgatgacggttcttcgttcgatgaatcaacttatacatcaagcaaatctggtgtgttagttgtttatgttgttgataataatactgctcgtgcaacatggtacccagatgattcaaacgatgagtacacaaaatacaaaatctacggcacgtggtacccgttttataaaaagaatgatggaaacttaactaagcaatttgttgaagaaatatctaacaacacactgaatcaagctaaacagtatgtagatggtaagttacaaagtataagttggcaacaacataagttaacagaacataacggtcaatcaatccaaaagaacttatataacgccaaaggtaatttagaagcattgggcgctgggaattattacgtaacaagtgtgcctgatttaccaggtagcgttgaaagttatgagggttatttatcggtattcgttaaagatgatacaaacaagctatttaacttcacaccttataactctaaaaagatttacacacgatcaatcacaaacggcagacttgagcaacagtggacagttcctaatgaacataaatcaacggtattgttcgacggtggcgcaaatggtgtaggtacaacaatcaatctaactgaaccgtacacaaactattctattttgttggtaagtggaacttatccaggtggcgttattgagggattcggactaactgcattacctaacgcgattcaattgagtaaagcgaatgtagttgactcagacggcaacggtggcggtatttatgagtgcttactatccaaaacaagtagcactactttaagaatagataacgatgtgtactttgatttaggtaaaacatcaggttctggagcgaatgccaacaaagttactataactaaaattatggggtggaaataatgaaaatcacagtaaacgataaaaacgaagttatcggattcgttaatactggcggtttacgcaatagtttagatgtagatgataacaatgtgcctattaaatttaaagaagagttcgaacctagaaagtttgttttcacaaacggcgaaattaaatacaatagcaatttcgaaaaagaagacgtaccgaatgcatcaaaccaacaaagtgcgtcagatttaagtgatgaggaacttcgcggaatggttgcgagtatgcaaatgcaggtggcacaagtaaacgtattaacaatggaattagctcaacaaaacgctatgttaacacaacagttgactgaactgaaaactaacaaaacaagtactgagggggacgtttaaataatgaagatgatttatccaacttttaaagacattaaaactttttatgtttggggttactataaaaacgagcaaattaagtggtacgtagacaagggtttaatcgataaagaagaatacgctttaatcactggagaaaaatatccagaaacaaaagatgaaaagtcacaggtgtaatgcttgtggctttttaatttgaataaagtgggtggcataatgtttggatttaccaaacgacatgaacaagattggcgtttaacgcgattagaagaaaatgataagactatgtttgaaaaattcgacagaatagaagatagtcttagagcgcaagaaaagatttatgacaaattagatagaaattttgaagaattaaagcgcgacaaggtagaagatgaaaagaataaagaaaagaatgccaagaatattagagacataaaaatgtggattctaggtttgatagggactatcttcagtacgattgtcatagctttactaagaactgtttttggtatttaaaggaggtgattaccatgcttaaagggattttaggatatagcttctgggcgtgcttctggtttggtaaatgtaaataacagttaagagtcagtgcttcggcactggctttttattttgattgaaatgaggtgcatacatgggattacctaatccgaaaaatagaaagcccacagctagtgaagtggttgaatgggcgttatatatcgctaaaaacaaaatagctattgatgtacctggttctggaatgggagcacaatgctgggatttacctaattatttactcgataaatattggggatttagaacatggggaaatgctgatgctatggctcagaaatctaattatagaggtagagatttcaagataattagaaatacaaaagactttgtaccacaaccaggcgactggggtgtttggactggtggttgggcaggtcatgtgaacattgtagtagggccatgcacaaaagactattggtatggtgtggatcaaaactggtatacaaataatgcaacaggaagtccgccgtataaaatcaaacactcttatcatgatggaccaggtggaggagttaaatattttgttagaccaccatatcatccggagaaatctacgccggcacctaaaccagaagatgatagtgatgataacgaaaaaaataataaaaaagttccaatttggaaagatgtaacaactataaagtacactatttctagccaagaggttaattatccagaatatatttatcactttatagtagaaggtaatcgacgactcgaaaaacctaaaggaataatgattagaaacgcacaaacgatgagctcggtagaaagtttatataacagtaggaagaaatacaaacaggatgtagaatatccccacttttatgttgacagacataatatttgggcacctagaagagctgtatttgaagttcctaatgaacctgattatatagttatagacgtatgtgaagattatagtgcgagtaaaaatgaatttatttttaatgagattcacgcaatggttgtagctgtagatatgatggccaaatatgagatacctctaagtattgaaaatttaaaagtagacgacagcatttggcgttcgatgttggaacatgttaattggaatatgattgacaacggtgttccccctaaagataaatacgaagcattagaaaaggcattacttaatatatttaaaaacagagaaaaattattaaattctataactaaaccaacagtaacaaaatctagaataaaagttatggtagataataaaaacgctgatatagcgaatgtaagagactcatcaccaacagctaataatggctcggcatctaaacaaccgcagatcataacagaaacgagtccttatacattcaaacaagcactggataaacaaatggcaagaggtaacccgaaaaaatctaatgcttggggttgggctaacgctacacgagcacaaacgagttcagcaatgaatgttaaacgaatatgggaaagtaacacgcagtgctaccaaatgcttaatttaggcaagtatcaaggcgtttcagttagttcgcttaataagatacttaaaggtaaggggacattgaataatcaaggtaaagcgttcgcagaagcttgtaaaaagcacaacattaatgaaatttatttaatcgcgcatgctttcttagaaagtggatatggaacaagtaacttcgctaacggaaaagatggagtatacaactacttcggtattggcgcttacgacaacaatcctaactacgcaatgacgtttgctaggaataaaggttggacatctccagcaaaagcaatcatgggcggtgctagcttcgtaagaaaggattacatcaacaaaggacagaatacactgtacagaatcagatggaatcctaagaatccagctacgcaccaatacgctactgctatagagtggtgccaacatcaagctagtacaatcgctaagctatataaacaaatcggcttaaaaggtatctactttataagagataaatataaataaagaggtgtataaatgtacaaaataaaagatgttgaaacgagaataaaaaatgatggtgttgacttaggtgacattggctgtcgattttacactgaagatgaaaatacagcatctataagaataggtatcaatgacaaacaaggtcgtatcgatctaaaagcacatggcttaacacctagattgcatttgtttatggaagatggctctatattcaaaaatgagccccttattatggacgatgttgtaaaagggttcattacctacaagatacctaaaaaggttatcaaacacgctggttatgttcgttgtaagctgtttttagagaaagaagaagaaaaaatacatgtcgcgaacttttctttcaatatcgttgatagtggcattgaatctgctgtagcaaaagaaatcgatgttaaattggtagatgatgctattacgagaattttaaaagataacgcgacagatttattgagcaaagactttaaagagaaaatagataaagatgtcatttcttacatcgaaaagaatgaaagtagatttaaaggtgcgaaaggtgataaaggcgaaccgggacaacctggagcaaaaggtgaagcaggtaaaaaaggagaacaaggcgcacccggtaaaaacggtactgtagtatcaatcaatcctgacactaaaatgtggcaaattgatggtaaagatacagatatcaaagcagaacctgagttattggacaaaatcaatatcgcaaatgttgaagggttagaaaataaattgcaagaagttgaaaaaatcaaagatacaactctcaacgactctaaaacgtatacggattcaaaaattgctgaactagttgatagcgcgcctgaatctatgaatacattaagagaattagcagaagcaatacaaaacaactctatttcagaaagtgtattgcaacagattggctcaaaagttagtacagaagattttgagggattcaagcaatcattaaacagtttgtatgcagataaaaatcatagtcatacaatcaaacagattgaaggattagaaaatgctttatcaaaaaaatcagacataaatcacagtcatgatgaacgttatcttttatcatcaaatgcttttacaaaagaggaagcagataaactttatcaacctatcggttcttcgcagccgtcactgaatatttggacaggcagtgaaacagaatataattatttgtatcaaaaagaccctaatacactttatttaattaaggggtgatttttatggaaggtaattttaaaaatgtaaagaagcttatttacgaaggcgaagcatatacaaaagtatatgctggaaatatccaaatatggaaaaagccttcatcttttgtaataaaacccttacctaaaaataaatatccggatagcatagaagattcaacagcaaaatggacaataaatggagttgaacctaataaaagttatcaggtgacaatagaaaatgtacgtagcggtataatgaggatttcgcaaactaatttagggtcaagtgaattaggaatatcaggagtcaatagcggagttgcaagtaaaaatatcaactttagtaatccttcagggatgttgtatgtcactataagtgatgtttattcaggatctccgacattgaccattgaataattttaaacgactaattttttagtcgttttttattttggataaaaggagtaaacaaatggatatcggtacaatcgtaagaacaattttattaatagtcgcatggatcaatcagtttttagcaatcaaacatatttctccaatcccagttgacgaagtgtttataagcacagtcgttactgggattgtttcaatttggacgtggtggaagaataacaactttactcacgcatctaagaaagggcaacaaaaaatttatgaagtaaaagctggcattcagtcaactggtggcgcacctaaagtgaacggagatgataacaatgccgtcggttaggacatacagtcaagctattagttatcttaaaagtttagagggtaaggcgtggaatccagacaatgcatttggatgtcaatgcttcgatactgctaaccaatattggctttacttatttaatcacaggttgaaaggtgtgggcgctgcagacattccaacatggaatgatttcactaacgaggcaaccgtttacgaaaatactgtgtcgtttcaagcattgcctggcgacgtcgttatttttaaccgtaattatggtggtggttatggtcatgtaggtattgtaataagcgctacgttagattctataactattttagagcagaactggctaggcggtgcttactggagtccaccagaagttactacaagacgcacacacggctacgacttccctatgtggtttatccgtccattctacgcaaaagaaacgaccgctaataagctaagaagcgcagtgaagccagttaaacaagataagttatcaaaaggtaaaaaaatcatgcttgtggctggtcatggtattggtgcatactctaacgacccaggtgccgttgcgaatggagaaaacgaaagagattttaaccgtaaaaatattatacctagagtgaaaaagtatcttgagtcagtaggcaacacagtattgttatacggtggcaactcgatgaatcaagatttatatcaagatacattgtacggtcaacgtgttggaaactataaagattatggcatgtactggattaaaagtgaagtcaaaccggatgcaatcatagagtttcatttagattctgctagcccacaagcaagtggcgggcatgtaatcattagcgatcgtttcccagctgatgacattgacaaggcattaagtagtgcattagataaaacagtgggtaaaataagaggtgtgacacctagaggggatttattgaacgctaacgtgtctgctgatcttaatcttaattatcgtttaatcgaattaggttttatcacatctacgaaagatttaaactacattaaaaacaatttagacagcttcacgaagcggattgctgaagccattaacggcagacaaattgatgcgccaagtagtaagccaagcgctgacaaaataacatggaattggaaaggcgtattttatcctaatccagaaaaagctataagagtcagaaaaacagctggattaaccggcacagtcgttgaagaagattcatggctatacacaaaagatgattgggtaaaattcgaccaagtcattaaaaaagatggctactggtggattagattcaaatatcaacgtgagggctctagtactaacaatttctattgtgcagtgtgtagaattactgataaggaacaaaagattaaaaatgaaaaatattggggcacgattgagtgggcttaataggttgtacctataaaaagaaaagaggtaggttattttcttcctacctctaaaaatgattatctttctattgttatatgagttatatctttaggactaatcagtctattttttacattagaatcttgatctcctaccttgccatatactttttcatcagaaggatctttactatggatagttactttatcaccgactttaacaatatgcttttcttttaatttatctactaattttttccatgcatcatttgcctctattgtgtttccgtttggattaactcttgtaatatcgacacggttaacgctatcaggactaacggtgctgttattagtattactaagattatctaagttcgcagtcccagaaatttcgctctctccaccgttttttaatttatattttactttaatcgtttctttgtctgttttatcaatgatatttgcgtcttttaaagcgtctcttacatttttccacaattcgctatctgttatttcagaagcttttgcaacgttattaataccattataatttgaagaagaatgaaaacctgaacctactgttgttaaaactaaagcacttgctatcaatgtttttgttaatagttttttattcattttattttctcctataacttatttgcaatcgattacaaagtaattttagaattattatttatgtaaatcaattaaataattattaacaaatccataaaattttatcattgaaatataataattttgagctagaaatattcgtcatttatgctataatcgttttagacacagcaatgtgttcaaattttcatctattcgtaagttagccttcgggctgactttttatttccattattcacatgttaatcttgttgttgtttaggcaggtacttcggtacttgcctatttttttatgcaaattttaaaaaacacttgactaataaacatttgtttagtataattatatttgtaggttagttgatgacttacaaattatgtgtaaggaggtgaaaagcctcatgctagacataataaaaacacttctagaacatcaagtattggcagtactgataattccagaagtgttaaaacaacttagagaatggcatctcggctacctagaccgaaagccaaacaacaaagattaacattatgcttggagcctgatggctcctccttacacttatataatataatattatttggaggttttcaattatgacagaacaaatgtatttaatattgtttttattaagcctaccattgttattatttatcgggagaaaaacacatttttattgtttagataaaaagaatggacgtagataatatgagtgattataaattaaaaataattgaattgatcaaaagtgatataacaggttaccaaattcacaaacaaactggcgtagcgcaatatgtaatttcacaattaaggcaaggaaagcgcgaagtagataacttaactttaaatacaactgaaaaactatacagttacgcacgacaagtgttataatataaatgtgaaatggtcattcttgaaatgactcggtcgctactggcacagaccgtttaaagtgtcaccacaacatgaactgagaattcatatgacgttgctgacgagcgacaaagctctgtgttcctggatgggagtaagtttgtgtggtggtgcataacaagtcgctgaaatatttgcgacataataaagcatattatcggttttattaagtgctaaaggcacatcttaaccacccatactagttactgggtggttgttttttatgttatattataaatgatcaaaccacaccacctattaatttaggagtgtggttattttaatatatgaagctaaaataactacaaatgataccatttttgataccaaaaaataataacctcaaaatatcgagagaaataacttcattttaaatcgcattaaatcaatgtttctataaaaataagtccttaaaaattagttttttcaatcgaaatggaaggtagtattggatagctttaaaccgcgttgttaagccattcttgacttccggaaatgggtattgataccattttgatactgaatataacaaaaagccacattactgtggctttttttgttttataactaaatcggattgatagataagctttgtacttatttatatcagtccgattttttgattggtgtaaaaaataatcattgatggtggataaagcgacaacacaaatacaatatgattgtggcattagagtgctggtctttattaaattaattgaaaactacatcaaatattctttaaagataattcgatattagttcgattaagattcgttgtataagtgagttaaaataagaaaactattaataatattaagttcactacagatgttgctaatggaccataagttttaaagacatcttcacttttataaccaacaatcgcatctaaaaattgaactaaaatcattgcaatggatatagttatcaaaaatatagcactatgaatgactaaagaaaaaatagctaataaaaataaaggtaagcttcgactaagtgcataatatgcatttatattatgactagatgcacatgcttgaattgaataacctaaacttacactggcactaatgattgtaaatattgctaaaacaaaatacatgttaatccttctttctatatttgaatataaacaagtacttgtctaaagatatttaaaagataattagaataaatttatgagaaactggttgttatcattataatggtttcaaatgattataactatgtcataaactgaatttgttgaaatttttcattatgtaaatttattaataacaaacagctcgaactatagcatcattttactaatgaatgcattaaagtaactatgattaaaaatgcatattaattatcattattaagtctattatatataatgaattttaactggtttattaaacgagaacgtcgggaattaagtaactacaataaaaataagatatgacaataaggagactacacgcgtgatcattgccataattatattgatatttatttcgtttttcttttcaggaagcgagacggcattaacggctgccaataaaacaaaatttaaaactgaagctgacaaaggtgataaaaaagcaaaaggcattgtaaagttacttgaaaaaccaagtgagtttattacaacgattctaattgggaataatgtcgcgaatattttattaccaacacttgttacaattatggctttacgttgggggattagcgttggtattgcatcagctgttttaacagttgttatcattttgatttccgaagtgattcccaagtctgtcgctgcaacatttccagataaaataacaaggcttgtatatccaattattaatatttgtgtcattgtgtttcgccctatcacattacttttaaataagttgacggacagtattaatcgaagtttatctaagggtcaacctcaagaacatcaattttcaaaagaagaatttaaaacaatgttagcaattgctggacatgaaggtgctttaaatgaaattgagacgagtaggttggaaggtgtcattaattttgaaaatttaaaagtaaaagatgtagatacaacacctagaattaatgtgacggcatttgcttcaaatgcgacatacgaagaagtttatgaaacggttatgaataagccatacactagatatccagtgtacgagggagatattgataacattattggggtgtttcattctaaatatctgttggcttggagtaataaaaaagaagatcaaattacaaactattcagctaagccattatttgtgaatgaacacaataaagctgaatgggtattacgtaagatgactatttctagaaaacatttagcaattgtgttggacgaatttggtggtaccgaagcgatagtgtcacatgaagacttaattgaagaattattaggtatggaaattgaagatgagatggataaaaaggaaaaagaaaaactttctcaacagcaaattcaatttcaacaacggaaaaatcgcaacgtatctatataaggagcgaacagctatgtggaataagaatcgacttactcaaatgttaagtattgaatatccaattatacaagcaggtatggcaggaagtacgacaccgaaattagttgcatcagtaagtaacagtggtgggttaggcacaataggcgcaggttactttaatacgcagcaattggaagatgaaatagattatgtacgccaattaacgtcaaattcttttggcgtaaatgtctttgtaccaagtcaacaatcatataccagtagtcaaattgaaaatatgaatgcatggttaaaaccttatcgacgcgcattacatttagaagagccggttgtaaaaattatcgaagaacaacaatttaagtgtcatattgatacgataattaaaaagcaagtgcctgtatgttgttttacttttggaattccaaatgaatctattatagaaagattgaaagaagcaaacattaagctaataggtacagcaacaagtgttgatgaagctattgcgaatgaaaaagcgggtatggatgctatcgttgctcaaggtagtgaagcaggtggacatcgtggttcatttttaaaacctaaaaatcaattacctatggttggaacaatatctttagtgccacaaattgtagatgtcgtttcaattccggtcattgccgctggtggaattatggacggtagaggagttttggcaagtattgtcttaggtgcagaaggggtacaaatgggcactgcatttttaacatcacaagatagtaatgcatcagaactactacgagacgcaattataaatagtaaagaaacagatacagtcgttacaaaagcgtttagtggaaagcttgcacgcggtatcaacaataggtttatcgaagaaatgtcccaatacgaaggcgatatcccagattatccaatacaaaatgagctaacaagtagcataagaaaagccgcagcaaacatcggcgacaaagagttaacacatatgtggagtggacaaagcccgcgactagcaacaacgcatcccgccaacaccatcatgtccaatataatcaatcaaattaatcaaatcatgcaatataaataatcgaccgcaatccacaaaagcacaagcactcccaaacattattttagtgcttgccatttttgtggattgcgtttctattttaccaatctagtcaaacgaaattatcaaactaaagttcgctgaaatgattatgatcaaacgaaattatcgagctgaaggtcaccgaaatgattataattaaacgaaattatcgagctaaagttcactgaaatgattataatcaaacgaaaacatcaagctgaagatcgccgaaagattttaatcaagcgaaaacatcaaattaaagttcgctgaaatgattatgataaaagttatatggtatgatgacattggtgatatatatgataaacatcggattaacaggttggggtgatcactattcattatatgaagatttagaacgccaaaccgataaacttaaaacatatgctggacattttccggttgtcgaattagatgcgacatactatgcgatacaaccggaaagaaatatattgaaatggataaaagaaacgcctgatacatttgaatttgtggtcaaaattcatcaagcactcacattgcatgcagactacaaaacatttgcagatacaaggcaagaactatttgatcaatttaagaatatgttagagcccttacatacacagaaaaaattagcaatggtattggttcaatttccgccatggtttgactgcaatgcacaaaatatcaaatatattttgtatgtaagacagcaattacaagcatttccaatgtgtgtagaatttaggcatcaatcatggtttagtgatgcatttaaagaacaaacattggcatttttaacagaacatcaaatcattcatgcagtagttgatgaaccacaagtgaaagatggcagtgtacctttagtcaatcgaatcacaaatgaaattgcgtttgtacgttatcatggacgtaatcattacggttggactaagaaagatatgtcagatcaagaatggcgagatgtacgctatttatatgattataatgagcaagaattaatagacttggcacaaaaggcacaaatattagcacaaaaagctaagaaagtttacgtcatatttaacaataattctggtggtcatgcagcaaataatgccaaaacatatcagcgattattgaatatagaatatgaagggttagcaccacaacaattaaaattattttaagaggcgacgactatgttattaacaattacattattagttttaatcggaggtttgtcagcgattatagggtctatcgtaggcattggaggcggtattattatcgttccaacaatggtttacctcggtgttgaacatggattactacataatattacaacacaagtagcgatagggacgtcttcagtcattctaattgtgacaggactttcttcatcacttggatatttaaaaacaaaacaagttgatattaaaaatggttccatctttttatttggactattaccaggttcattgcttgggtccttcattagtagatatttaacatttgagtcatttaatttatattttggtatctttttaattttcgtagccattttattaatggtaagaaataagattaaaccgtttaaaattttcgataaacccaagtatgaaaagacttatgtagacgctaaaggtaaaacatatcattatagtgtgccaccattgtttgcttttattacaacgtttttaattggtatattgacaggtttatttggtattggaggtggcgcactaatgacgccactaatgcttattgtatttagatttccacctcatgtagctgttggaacaagtatgatgatgattttcttttcaagtgtcatgagttctatagggcacattgctcaaggtcacgtagcttggggttatgcaatcattttaattatttctagttattttggtgcgaaaatcggtgtcaaagtgaatcaatcaattaagtcagatacggtagtaacattattgagaacagtaatgttgttaatgggtatatatttaattattcgagcgttgatttaatacaactttaaaaggaggacgtcaatttgaggcttacaatttatcatacgaacgatattcatagtcatttacatgaatacgaacgcattaaagtatatatggcagaacaacggccacgacttaatcatccttctttatatgttgatctaggtgatcatgtagatttatccgcacctataactgaagcaactttaggtaaaaagaatgtggcattactaaatgaagcaaaatgtgatgttgcaacaatcggtaataatgaagggatgaccatttcacacgaagctttaaatcacctttacgacgaagcaaaatttatagtgacatgtagcaatgttatagatgaatcaggtcatttaccaaataatatcgtttcttcttatattaaggatatggacggtgtgaaaatactattcgttgcagcgacagcaccttttaccccattttatcgtgcactagattggattgttaccgatccacttgaatctataaaagaagaaattaaacatcaacgaggtaaatttgatgtaataatcgtgctaagtcattgtggcattttcttcgatgaaacattatgccaagaattgcctgaaattgatgtcatttttggtagtcatacgcatcattattttgaacatggtgagatcaataatggtgtactgatggcggcagctggaaagtatggtaattatcttggagaggttaatttaacttttgaggcacataaagtagtacataaaactgcaaagattattcctttagaaacattacctgaagttgaaacttcatttgaagaagaaggaaaaacgttaatgtccaattcagtaattcaacatccagtagtgcttaagcgtagtatgaatcacataactgaagctgcatacttattagctcaaagtgtttgtgagtatacacatgcacaatgtgccatcatcaatgctggcttactcgttaaagatattgtaaaagatgaagtgacagaatatgacattcatcaaatgttaccgcatccgattaatatggtaagggttagactttctggtgtgaaattaaaagagattataactaaaagtaataaacaagaatatatgtatgaacatgcacaaggtttgggtttcagagggaatatatttggaggatatattctttataatttagggtacattcattctacagggcgttactatctgaatggagaagaaatcgaagacgacaaagaatatgtattaggtacgatagacatgtatacgttcggtcgttatttcccaacactgaaagaattaccaaaagagtatttaatgccagagtttttaagagatatatttaaagaaaaattattggaatattaaaaagtaagattattggattttcatttgtcatgaatttcgatataatgtttaaagatacacttaacaggagggtatgtgttgttatggcgacaaaaaacgaggaaatattacgtaaaccggattggttgaaaataaaattaaataccaacgaaaactatacaggacttaagaagatgatgagggaaaaaaatcttaatactgtatgtgaagaagctaaatgtcctaatatacatgaatgttggggtgcacgtcgtacagcgacatttatgattttaggtgccgtatgtacaagagcttgtcgtttttgtgcggttaagacaggtttacctaatgaacttgatttaaatgagcctgaacgtgtagctgaatcagttgaattaatgaatttgaaacacgttgttatcactgctgttgcgcgtgatgatttaagagatgctggttcaaatgtttatgctgagacagtacgtaaagttagagaaagaaatccatttacaacgattgaaattttaccatcagatatgggcggggactatgatgcgttagaaacattaatggcgtcaagacctgacattttaaaccataatattgaaactgttcgtcgcttaacaccgagagttcgtgcgcgtgcgacttacgacagaacattagagtttttacgtcgttcaaaagaattacaaccagatatcccaactaaatcaagtattatggttggattaggtgaaactatagaagaaatttatgaaacgatggatgatttacgtgcgaatgatgtagatattttaacgattggtcaatatttacaaccttcacgtaaacatttaaaggttcaaaaatattacacgcctttagagtttggtaaattaagaaaagtggcaatggataaagggtttaaacattgccaagctggacctttagtacgtagttcttatcatgcggatgagcaagtaaatgaagctgctaaagaaaagcaacgccaaggtgaggcacagttaaatagttaatatttaacaattaataaggcataaaggcttagtttgtacaaaacgaacgtgtcatagaagtaatcattatttttatgaaacactaaaagtataaactgagcctttcattgtcatagataggtgaagaatttgataaaagtagatcaacattactttgaattaatagaaaattatcgcgaatgttttaatgaagaacaatttattgctaggtattcagatattttagacaaatatgattacattgttggtgactatggttacgatcaattacgattaaaaggcttttacaaagattctaataaaaaagcagagatgagtaaacgtttttcaaatattcaagattacatatttgaatattgtaactttggttgtccttactttgtattaagacatttgtctaaacaagaggttaaaaagttaatcgaagaagttcatccgtctgatgtgatagatgacgacaataaacttcaagatgtgaagattaagccaaccattcaagatactgaacattaataaaacccttagctagattgaaaatgggaatcatgcaattcaagcatggacctgtaatctagttaggggtttttatctttaatgaaggttcttcatcttttatggtgggaaggtaaaacttcctgctttttttaatacacaaaaagcgcaattgcctctataatttaaagtgaccaaacccaaactaaaggagacaagtgcgcctatgtgtaatgataccttagaattactaagaataaaagatgaaaatataaaatatataaaccaagaaattgacgtcattatcaaaggaaaaaaagcaacagtggttaatgctgtactaacgtataagccttcggcctgttattgttgtggagttaaaaatgaaggacaaattcataaacatggtaagcgtgtttctcgtattactttacttaaaactcaagggtataacacatacctcaacttagctaaacaacgttttaaatgcttagaatgcaatggcacttttactgctaaaacgtcaattgttgatgagtcgtgttttatctcaagatgtgttactcaaaaagttatagaagaagctactaaagttaaaacagagattgatactgcagaagataactgtatctctccatctactgtaagtcgtattagaactaaagcggctaattcattacgaattaaaccgtttaattgtttgccagaacacatcgctatggatgaatttaaaagcgttaaaaatgtaactggatcaatgagtttcatttttatagataatgatactcatgatgttatagatattttagaaaatagaactacaagattcttgcgtgcctatttcgagcgattcgatttaaaaaatcgacaacaagttaagacggttactattgacatgtatgaaccctatgtccgattatttcgcgacctatttcctaatgcagctattatttttgacagattccatatcgttcaacatttaaatagggaacttaataagtatcgtgtacaagttatgaatgaataccgtaataaaaaaggacctaattatacaatttttaagaataactggaaagttctattgatggatactagtaaaaccatatttagtaaatacagatggaataaatcttttaaggcttataaacgctcatctgacattgtagaattcatgctttcaaaagacgatatactacgacgctcctacgaacttgtccaaggattaagaaaagatctaaggttatgtaattggcctaaatttattaatcgtttaaattcagttagtaaaaagtctgtgagtaaaggtgtatggaaagtggttaaatattatagaaaacatcaaaggatgttaagaaatacaatttattacccagcatttaataatggtgctatagaaggaattaataataagataaaattaatcaagcgaatttcttttggttacagaaatttcaacaactttaaagcacgtataatgatgattttcagcttatacaaaggagaaaaaaagaagacaaccaagcccaataatggactggccgcctaataataaaaactctaaaagttgtaatttaaaatagttctttaaattatatacccaccacatttggtggagaaccttaatgaatgacttcatttaaatactcagtaatttcatcgccttcttcagcatttacacctaaaatatgagcgatatagccttcttcttttaaatcatcagtaccgataataccgaatttatttgtttgcatattaagtacgagtgtcttaccataatgtctatttgtatggactaacatcaaatcatatcgactatgctcgccaacaaaaccaacaaactgaacttgactctcttcgttgtcatcatataaatacatatcaatcattttgtagcgactccttttaaaagtagtaaagttagtataacgacaaatgaagtatactgcaaaattatgataatatataagcgagaggtgacaaggaatgtattttgtagacaaagataaactaactcagaaattagcctatttacaagcattaactgatgattatcatgagagcaagcacaatcattatgcatttgaacgcattgctcaaatgttgatagaatcatcggtagatatagggaatatgattatcgatgcatttattttaagggatcctggtaattataaagatgtgattgatatattagaactagaaaatgttattactaaagaaacacagcaggagattaataaaactgtcgatattcgtaaacaatttacatatgattacacagccttagatattaaggttatcatgccaatgtttgatgacgcattaccttattacaaacaatttattacagaagtaacgatatttttacatcaagaaaatgtaccagtaacagcttttggtaaaggagaaaatcaataatgaaacagtataaagcgtatttaatcgatttagatggcacaatgtatatgggaacagatgagattgatggagcaaaacaattcatcgattatttaaatgtaaaaggcattcctcatttatacgtaactaataattcaacaaaaacacctgagcaagtaactgaaaaattacgtgaaatgcacattgatgctaaaccagaagaggttgtaacgtcagcgttagccactgctgattatatttcagaacaatcaccaggagcatcagtatatatgttaggtgggagtggtttaaatactgcgttaaccgaagcgggacttgtcattaaaaatgacgagcatgttgattatgtagttattggacttgacgaacaagttacatatgaaaagcttgcgattgcaacgttaggtgtaagaaatggtgcaacatttatttctacaaatcctgatgtatcaattcctaaagagcgtggtttattacctggtaatggtgctattacaagtgttgtaagtgtatcgacaggtgtatcgccacaatttattggtaaaccagaaccgattattatggttaaagcattagaaattttaggattagataaatccgaagttgctatggtaggcgatttgtacgataccgatattatgtctggtattaacgtaggtatggatacgattcatgtacaaacaggtgtatctacgttagaagatgtgcaaaataaaaatgtgccaccaacgtattcttttaaagatttaaatgaagcaatagctgaattagaaaaatagatatagtcattttataaagtaggtgaattgatttggtaaaaatagttgtttcgaggaaaattccagataaattttatcaacaattaagtaaacttggtgacgttgttatgtggcaaaaatcattagtgcctatgcctaaagatcaatttgtgacagcacttcgtgacgcagatgcttgttttattacattaagtgaacagatcgatgcagaaattttagcacaatcaccaaatttaaaagtaattgcgaatatggctgtaggatatgacaacatcgatgttgaaagtgcaacagcgaataacgtggttgtcacgaatacaccaaatgtacttactgaaacaactgcagaattaggatttacattaatgcttgctatagcacgccgtattgtagaagctgaaaaatatgtagaagcagatgcatggcaaagctggggtccttatttattgtcaggtaaagatgtcttcaattcaactattggaatatatggtatgggagatattggtaaagcttttgcaagaaggttgcaagggtttaatactaatattctttatcataatcgatcaagacataaagatgcagaggcggactttaatgcaacatatgtttcttttgaaacgttgttagcagaaagtgattttatcatctgtacagcgccacttacaaaagaaacacatcataaatttaatgctgaagcatttgaacaaatgaaaaatgatgcaatttttattaatatcggtagagggcaaattgtagatgaaacagcattaatcgatgcactagacaataaagaaattttagcatgtggtttagatgtattagcaaatgaaccgattgatcatacacatccattaatgggacgtgataatgttctgattacaccacacattggtagcgcatcagtaacaacacgggacaatatgattcaattatgtattaataatatagaagcggttatgacaaatcaggtaccacatactccagtaaattgaaaataagtatggtttttaatcattggtaaaacaagcaaagcaattgttaaatatgttatgcttgacttgcgaatgtatatatttgcgctgatgataattcaataacattataaactcgtcatattaatgtgatgagtttatttgattttgacgtatataacaaaattgttatatagactgtaattgtttattgtttaaataacctttaaaatgaatgatgttctcaacaaagtgtatcatttacaataattgagtgatgacaaccaattactatgttgaatctataaaattaaaattgaatttcattatgaatatcgatataatgaattgtaaaaaacaaattttaaaacgtattttatattgaacggtctttataaaggcgtttttactaagaactttaagaggtgcaatatgaaatctaaaagtaaacagccacctaataaatatgttgaagcattcaaaccatatttattaacactattgtatttggcaatatttattactttatatttaatttatggcagtggcgacacacacaataacttcatttataatgagttctaatgagggagacttaatatgacagatattattaacaagctgcaagcgtttgcggatgcaaatccacaaagcattgctgttagacacacaactgatgaattaacttatcaacagttaatggatgagtctagtaaattagcacatcgattacaaggtagtaagaaaccgatgattttattcggtcacatgtcaccatatatgattgttgggatgattggtgccattaaagcaggatgtggatatgtacctgtagacacttcaattcctgaagaccgtattaaaatgattattaacaaggttcaaccagagtttgtatttaatacgactgatgaatcatttgaaagtttagaaggcgaagtatttacaattgaagatattaaaacatctcaagacccagtaatttttgatagtcagattaaagataacgacacagtatacacaatctttacatctggttctactggggaacctaaaggtgttcaaattgaatatgcaagtttagttcaatttactgagtggatgttagaacttaataaatcaggaaataaacaacaatggcttaaccaagcgccattttcatttgatttatctgtaatggctatttatccatgtttagcatcaggcggtacattaaatcttgtagataaaaacatgattaataaacctaaattattaaatgaaatgctaacagcaacaccgattaacatttgggtatcaacaccatcatttatggaaatgtgtttattattaccaacgcttaatgaagaacaatatggtagtcttaacgaattcttcttctgtggtgaaattctacctcacagagcagcaaaagcgttagtgagccgtttcccaagtgcgacgatttacaacacatatggtccaactgaagctacggtagcagttacaagtattcaaattacacaagaaatcttagatcaatatccgacattacctgttggcgttgaaagactaggcgcaagattatctactacagatgacggtgaacttgttattgaaggtcaaagtgtaagtttaggatacttaaaaaatgaccaaaaaacagctgaagtatttaatttcgatgacggtattcgtacatatcacactggtgataaagcgaagtttgaaaatggtcaatggttcattcaaggtcgtattgatttccaaatcaaattgaatggctacagaatggaattagaagaaattgaaacacaattacgccagtctgagttcgtaaaagaagcgattgttgtacctgtatataaaaatgataaagttattcatttaattggtgcaattgtgccaacgactgaagttacggacaatgcagaaatgactaaaaatattaaaaatgacttgaaatcacgcttaccagagtatatgattcctagaaagtttgaatggatggaacaattgccattgacttcaaatggtaaaattgacagaaagaaaattgcagaggtaattaacggatgattccatatggtgattttacattcttcttaattgctttaattgcattattaccagtcattatacttggatttttaggtaagcgaagttacatttataatggcgtagttacagcatttatgattgtgttaatcttttcttctgataaacataatctgtttgaccaaaagtatttaagtgttcaattaattagttttattatttacgtcgtatggcaagttttattgataatgttttattatcattcaaaaccaaaaaataattcattttcaaaatttgtaactgtaatggttttatcaatattgccattagcacttgtgaaagtgttacaaagtacatggttaggtggacatcagattcacttccatgaaagtaaattaattgaatttgttggtttcttaggaatttcttatgttacattcaaaagtgtgcagttaattatggaaattcgtgatggttctatcaaagaaattaaagtatggaaattaattcaatttatttcattcttcccaacgatttcatctggaccaatcgatcgttacaaacgtttcgttaaagacgataaaaaagtaccaacaggcaatgaatatcgtgaattagtattaaaagcaattcacatgattatgcttggtttcttgtataaatatattgttgcttactttattaacacatatgcaatcatgccgttacaattagacttacatggctttgtcaatttgtggttatatatgtacgcatacagcttatatttattctttgactttgcaggttatagtttatttgcgatagcatttagttatttattcggtattaaaacaccaccaaacttcgataaacctttcaaagcgaaaaatattaaagatttctggaatagatggcatatgacattatcattctggttcagagattgtatttacatgagatctttattctacatgtctcgtaaaaaattattgaagagtcaatttgcaatgtctaacgtggcattcttaatcaacttcttcataatgggaatttggcatggtatcgaagtgtattacattgtttatggtttataccatgcagcattgtttataggttatggctattatgaacgttggcgtaagaaacatccgccacgttggcaaaatggtttcacaacagcacttagcattgtgattacattccactttgtaacatttggctttttaatcttctcaggtaaacttatataataaaggagaatttaattatggaatttagagaacaagtattaaatttattagcagaagtagcagaaaatgatattgtaaaagaaaatccagacgtagaaatttttgaagaaggtattattgattctttccaaacagttggattattattagagattcaaaataaacttgatatcgaagtatctattatggactttgatagagatgagtgggcaacaccaaataaaatcgttgaagcattagaagagttacgatgaaattaaaaccttttttacccattttaattagtggagcggtattcattgtctttctattattacctgctagttggtttacaggattagtaaatgaaaagactgtagaagataatagaacttcattgacagatcaagtactaaaaggcacactcattcaagataagttatacgaatcaaacaagtattatcctatatacggctctagtgaattaggtaaagatgacccatttaatcctgcaattgcattaaataagcataacgccaacaaaaaagcattcttattaggtgctggtggttctacagacttaattaacgcagttgaacttgcatcacagtatgataaattaaaaggtaagaaattaacatttattatttcaccacaatggtttacaaaccatggtttaacgaatcaaaactttgatgctcgtatgtctcaaactcaaattaatcaaatgttccagcagaaaaacatgtctactgaattaaaacgtcgttatgcacaacgtttattacagtttccacatgtacacaataaagaatacttgaaatcttatgctaaaaaccctaaagaaactaaagatagttatatttctggttttaaagagaatcaattgattaaaatagaagcgattaaatcattgtttgcaatggataaatctccattagaacatgttaaacctgctacaaaaccagacgcttcttgggatgagatgaaacaaaaagcagttgaaattggtaaagctgatactacatcgaataaatttggtattagagatcaatactggaaattaattcaagaaagtaagcgtaaagttagacgtgactacgaattcaatgttaattctccagaattccaagatttagaattacttgtaaaaacaatgcgtgctgctggtgcagatgttcaatatgtaagtattccatcaaacggtgtatggtatgaccacattggtatcgataaagaacgtcgtcaagcagtttataaaaaaatccattctactgttgtagataatggtggtaaaatttacgatatgactgataaagattatgaaaaatatgttatcagtgatgccgtacacatcggttggaaaggttgggtttatatggatgagcaaattgcgaaacatatgaaaggtgaaccacaacctgaagtagataaacctaaaaattaaaatacaaatagcacataactcaacgattttgattgagcgtatgtgctatttttatattttaaatttcatagaatagaatagtaatatgtgcttggatatgtggcaataataaaataattaatcagataaatagtataaaataactttcccatcagtccaatttgacagcgaaaaaagacaggtaataactgattataaataattcagtattcctgtctttgttgttattcataatatgttctgttaacttaatatctttatattagaatacttgttctacttctattacaccaggcacttcttcgtgtaatgcacgctcaataccagctttaagagtgattgtagaacttgggcatgtaccacatgcaccatgtaattgtaatttaacaataccgtcttcaacgtcaatcaatgagcagtcgccaccatcacgtaataaaaatggacgaagacgttcaataacttctgctacttgatcaaacatcgttgtatcttcagtaggcatcaggcaagtctcctttcgagagatgaatttgataatctttattagtatattataatagatagtgtaataaaaatctatcaaaccaatgggggataaatatatggagcacgtgagtgtggtagtatatggggcagatgttatatgtgcaagttgcgttaatgcgccaacatcgaaagatatttatgactggctacagccgctattaaaaagaaaatacccaaatatatcatttaaatatacgtatatagatattacaaaagataatgacaacttaacagatcatgatttacaatttattgaaagaatagaacaagatgaactattttatccattaattacaatgaacgatgaatatgtagcagatggttatatacaaacaaagcaaatcactcgatttatagaccaaaagcttgtgaatgaataatatacacataacaaaaagcaatgtcagtaatagtgtgaactgacattgctttttaattttaaccattatgatatttatataaccaaagtacgccggattttaaaatagaagcgagtcgtcctgttacagtgcggtccatgatatatgcaaaaccttgtttatctcctaatgacccaacgataccttgtacctttagttccggcattttgtcaggtaatggttcatttagccattgctttttaagcacatcggcaatttgatcaccttgaacttcggctaactgagcacttggcgcatgtggtaaatcagcacaatcaccaactacatagacgttacgatatgttggtacttgatgatactggttaactatcacgcgtccattactatttatatcaatcggcaagttacgaacaacttcaacaggttgaattcctgctgtccatacaactaaatcaatatctttaggttcatcacagttatatattttaccaggttcaactttattaatatttgaatttggaacaacggtaacattatttttggcgaaccatttcgcaacatacttacttaatttttctggaaaatttcttaaaattcgcggcccacggtcataaagatatatttccaagtctgatctactttctcttaattcgctggcaagttctatgccacttaatccagcaccaacgataccaactttagcaccttctggtagttcactaatactatggaaagtatcccgagcctttgagagtgtttgaatactatgtgtatattcttcggctcctggaacgttatgatacttatcttcacatcctaaaccaatgattagctcatcataatcaattttagaattaccgactgagacaatttgagcatctaaatctatgtcgttaatttcaccataaactgtattcacttgtggatgattagggaatttcatgcgaacatctttatctgatttcgtgcccgcagctaaagcatagaattctggtttcaatccatgaaatggcatacgatcaactaatgtgactgtataatcttgtggtaaagaagtagttaaaatgcgtgacatgatacgcatattaccatatccgccgcctaacaaaactaagtttttcataatgaagtaccccttttatatgttaatatttactttaattttgaaaagatcaaagtgcatagatatatttgttaatgaacagttataaaatgcaagtgtctttgattcatcaataacccctaaaaaagtaaatatgtatttatatgcttattatatatttttttgaaaatgactacaaataaatatttgtactaactaaggcactattacataactgggataagaaacatcagttgttggtaattgagcacatcatgttaaaataccagttttaaaatgctataatattgtaacaaatgaaataagaaggtgaagtatgaatccgatcgtagaattttgtctctctaacatggcaaaaggtggagattatgtttttaatcaactggaaaatgacccagatgtcgatgtgttagagtatggttgcctgacacattgtggtatatgttcagccgggttgtatgctttagtaaatggtgatattgttgaaggtgattcgccggaagaattattacaaaatatatatgcacatataaaagaaacatggattttttaaggaggagttatcatgccaacagttatattaacagaagcagctgcctacgaagtaaaagatatgcttaaagcaaatgaaatgccagatggctatttaaaaattaaagtgaatggtggcgggtgcactggtttaacatacggtatgggtgcagaagaagcgcctggtgaaaatgatgaagtcttagaatactttggattaaaagtattagtagacaaagaagatgcacccgtattaaatggtacgactattgattttaagcaatcattaatgggtggcggtttccaaatcgacaatcctaatgcaattgcttcatgtggctgtggtagttcatttagaactgcaaaagttgcaggtaatcctgaaaattgctaataaaataactttttaatggttaacccaatttttgggatacaaattgatatcaattatgattagggacatatttgattatgtcctatttttacgtaaagatattttgttttattaaaaagcttattgaaaattaagaatctgactataaatagtaatttaaatgatcgtgataacggatacatttttaatcgaaatcaggctacgaaaaaattaattaattttttcacaatctgactgaatcttgcttgaaaatataacataaaagctatagaattagtattggattaaaaatgtcttttttgtgaacatcacaggtttttacataatttaaaagacttaaataacaaaatgatgataaactagtatacattgtggtaaaagtagtaatgaccagttgttactagtaattatcagcatttggttaaaaaaatatgaaagcttaggtgaaattaaatggctcaagatcgtaaaaaagtacttgtacttggtgctggttatgcaggtttacaaactgtaactaaattgcaaaaagcgatatcaacagaagaagcagaaattacgcttattaataaaaatgaatatcactatgaagcaacatggttacatgaagcatcagcaggtacactaaactatgaagatgtattatatcctgtggaaagtgtcttgaagaaagacaaagtgaactttgttcaagcagaagtaacaaaaattgaccgtgatgctaaaaaggtagaaacaaatcaaggtatttatgactttgatattttagtagtagcattaggtttcgttagtgaaacattcggcatcgaaggtatgaaagatcatgctttccaaattgaaaatgttatcacagcacgtgaattatcacgtcatatcgaagacaaatttgctaactatgcagcatcaaaagaaaaagatgataacgatttatctatcttagttggtggtgctggattcactggtgttgaattcttaggtgaattaacagacagaattcctgaattatgtagcaaatatggtgtggatcaaaataaagttaaaatcacttgtgttgaagcagcacctaaaatgttaccaatgttctcagaagaattagttaaccacgcagttagctacttagaagaccgcggtgttgaatttaaaattgctacaccaatcgttgcttgtaacgaaaaaggttttgtagttgaagtagatggtgaaaaacaacaattaaatgcaggtacttcagtatgggcagctggtgtacgtggtagtaaattaatggaagaatcatttgaaggcgttaaacgtggacgtatcgttacaaagcaagatttaacaatcaatggttacgacaacatttttgttattggtgactgttcagcgtttatcccagctggagaagaacgtccattaccaactacagcacaaattgcaatgcaacaaggtgaaagtgttgctaaaaacattaaacgcatcttaaacggtgaatcaactgaagaattcgaatatgttgatcgtggaactgtttgttctttaggttcacatgacggtgtaggtatggtatttggtaaacctatcgctggtaaaaaagcagcattcatgaaaaaagtgattgatacacgtgcggtattcaaaatcggtggtatcggtttagcattcaaaaaaggtaaattctaggctttaaataaagtttcagctaaacacataaaattaaattattcatttataaagtccttcagtgtcactgaagggctttattgttgtacaatttgaagtgagtaacatatcaaatctaaggaggtacattatgaattttaaattaaataacacactaagcaacgaaataaatacattgattattggtataccagaacatttaaatcagttagagcgcattagttttaatcatatcgatattacagaatcacttgaaagactaaaacatcaacatattattggtagtaaagttgggaagatttatacaactgcatttgatgtacaagatcaaacatatcgtttaattacagttggtttaggaaacttaaaagcacgtagttatcaagatatgttgaaaatatggggacatcttttccaatacataaagtcagaacatattgaagatacttatttacttatggattcatttatttcaaaatatgatcagttatcagatgtattaatggcatgcggtattcaaagtgagcgtgcaacatatgaattcgatcattataaatcaagtaagaaggcaccgtttaagacgaatttaaaccttattagtgaatcattaattgaattagatttcattcatgagggtatcagtattggccaatccattaatttggcaagagactttagtaatatgccaccgaatgtattaacaccacaaacatttgcagaagatattgttaatcattttaaaaatacaaaggtcaaagtagatgttaaagattatgacactttagtttctgaaggattcggacttttacaagcagtaggtaaaggtagtaagcataaaccgagattagtaaccatcacatataatggcaaagacaaagatgtagcaccaattgccttagttggtaaaggtataacgtatgattctggtggttatagtattaaaacgaagaatggcatggctacaatgaagtttgacatgtgtggcgctgcgaatgtcgttggtatcattgaagcggctagtcgtttacaactgcctgtaaatattgtcggagtgcttgcttgtgctgaaaatatgataaatgaagcatcaatgaagccagatgatgtatttacagcattaagtggtgaaactgtagaagtaatgaatacagacgctgaaggtagattagtccttgcagatgctgtgtattatgcaaatcaatatcagcctagtgtgattatggactttgctacattaacgggtgcagccatcgttgcactaggcgatgataaagctgctgcatttgaatcgaatagtaaagtgatattaaacgatatattacaaataagttctaaagtcgatgaaatggtatttgaattaccgattactgcaaccgaacgtgcaagtattaatcacagtgatatcgctgatttagttaaccatacgaatggacaaggtaaagcgctatttgcggcaagttttgtaacacattttagtggtcaaacacctcacattcatttcgatattgcaggtccagcaacgactaataaagcttcatataatggtccaaaagggccaacaggatttatgattccgacgatagtacaatggttaaaacaacaataatttaattatttgcctgatacaacttgtgtcttgttatacatttctaatttaactcttgaaagtataaaggatcgcattgtatcaggcattttcattgttgtaagaaaatataaatcgcatatccttgtgagcataaatcaacttgattagcattgcaaaaacttattataatcatatgctcattcagtcaacgactactaatataacattatagaacttaggattttgattggtgttccaggcttgtaaaattgtttaatttaatgaaagtgaaaattattttaagaaagacaattaactaaaaaataaagattatgggtatagtttgctattgacaggtgttaaagctactgatactatgtagtctataaacgctttagttcgatagagcgataaaggatggttatcatatgataaatgcagtagtaatagcagtaatattaatgattgtgctatgtttatgtcgattaaacgtagttataagcttatttatcagtgcgctagttggtggcttaatttcaggcatgagcattgaaaaagttataaatgtatttgggaaaaatatagtcgatggtgctgaggtagcattaagctatgcattattaggtggatttgcagcattaatttcatacagtggtatcacagactatttagtaggaaaaattataaatgcaattcacgctgaaaatagtcgatggtcaagagttaaagtaaaagtgacaataatcattgcattattagctatgagtatcatgagtcaaaacttaattcctgtacatattgcattcattccaattgtcatcccaccattgttaagtctgtttaatgacttaaaaatagatagacgtttaatcggtttgattatcggttttggtttatgtttcccgtatgtgttattaccatatggattcggtcaaattttccagcaaattattcaaagtggctttgcaaaggcgaatcacccaattgagtttaatatgatttggaaagcaatgcttattccttcaatggggtatattgttggcttacttatcggtttatatgtatatcgtaaaccacgtgaatatgaaacacgtaaaatttcagatagtgacaatgttacagagttaaaaccatatatcttaatagtaacaattgtggcaatactagctacatttttagtacaaacatttacagattcaatgatttttggtgcactggcaggggtactcgtattctttatttcacgtgcatataattggtatgaattagatgctaagtttgttgaaggtattaaaattatggcttatattggtgtagttattttaacagcaaatgggtttgctggtgtaatgaatgctactggtgatatagatgaattagttaaaactttaacaagtattactggtgataataaattatttagcattatcatgatgtatgtgataggtttaattgtcactttaggtattggatcatcatttgcaacaattcctattatcgcatcattattcattccttttggagcgtcaattggactagatacaatggcattaatcgcattgattggaacagcgagtgcattaggtgactcaggttcacctgcaagtgattcaacattaggaccaactgcgggattaaatgttgatggccaacatgatcatatacgcgatacatgtgtaccaaacttcttgttttataatattcctttaatgattttcggtactattgctgctatggtactataagcataaagaggtgaaaatatgactcatttattagagacatttgagatgtcaatagatcaccaggaagatggtttagttgttatttctatgcctgtcactgataaagtaaaacaaccatttggatatttacatggtggggcttcgattgctttaggtgaaacagcatgttcattaggatctgctaatttaattgatacaaccaaatttattccattaggtttagagatgaatgctaaccatattcattctgctaaagatggtcgtgttactgcgacagctgaaattattcatcgaggtaagtcgacacatgtatgggatataaaaattaagaatgacaaagaacaattaattacagttatgcgtggtacagttgctattaaacctttaaaataaaagaactgctagctgaaatgttatgagatattcataactacggctagcagtttttttatgcgctatattgttgtaattttagaaatgcttgttcaatgcgttcggcagctttacggccacccataacatttctaccaaatggtcctaattctaagtctgcaaagcatcctgcgacaaatagatttggtatccattctaatttttcggaaataacagggtaattacattcgttgataggtgcatcataattttgtattaattgcttaataagtggttgtgacataaaatcttgttcaaaaccagttgcaaccataatctgttgatatggaacagaatcattttcagtgttaattacaccaccactaatttgagtgataggtgttttatgcacatttatacgaccatttttaatatgttttttaaggcgtaagtacagttcgtgaggcattgatcctttatgacgttcacgttgtacaatggcatttctttcaggcatgcttttagtacttaaaaatgaagacatatttttcggacctaaccaaccaggatcagcatcaaagtcatgtatttcaatatctttatttagccataaatgaatctttttatcgttatcatgatttaacaatttaagtgcaagatgtgcagcagtaatgccactaccaacgatatgatcggtcttatcgtatactacttgatcatgttctttctcgaagatatgatttacattctgtttgtcttttaaaatgtcaggcataaacggaatatttgtactacctattgcaataacgacgcaatctgtagtgataatttgtccatcttctaacttgatatgccatttgtcttcttgtttatctaaagtttgaactaaaccttgaaccaagcaatcctctaattgatattgtttagaagcatgtgcaatatgattcataaacattgtcaattcaggtcgttgataaggaccataaaaagcatttgtatattggtgctgtttagcgaattgttttagatggaacggttgtggatgtacgtgatgtacaatcggtgatcttaaataaggcatttctattcgatttgtatatgagttaaacctttggcaaaaagtttcgtgtgggtcaatgattgttaataggtctgttgttaatccgcttgataatagtttttgtgcgattgcagttccctgtatgccaccgccgataattgtccaatgcataataaaacctctctttttttaaagcgtaatcgttacgatttatgattattattatcataatacataacgacatgaaaggcaattaaattaaagagatatacgtagatagggcgaagatgtagtcaaagaaaaaatcattgaaaaagaggtaacaatgtcaaaagaaaacagcagtaaaatcattcctaatttggaatcatcttactgctgtttgttgttgatttatattcatgattttgttatataatctacaattttgtgtcttttaagtcttccgaaatttcatcgactttagtctttttagtataaggcgttttaatattatatgctgctttcataatcatatgacttgaaagaggacctgtaattaatacaaagataatcgcaacgattaattgcatatttacaaaaccttgagtagcaataaaatataaaaaagtaccaaatagtaatgacattgcacctaatgttgatgcttttccggcagcatgtgcacgtgaatatacatcttcaagtctcaataatcctatagctgctagggcgctaattaaagcaccgatgataacaaagataagtgcaagactaatcagtatgattttgatcatgttcaatcaccttacctttgtccataaatttagagaatactgcagtacctaaaaaggctaatataccaatcatcataataacgacaatcatgtatttaatatttaataaaatactgaataatgctataactgccattaattgaagaccaatcgcatctaatgcgacaacacgatcggcaagtgatgggcctagcacaacgcgaatgagcatagctaacatagaaatgacaactatgattaatgcaataacgataataacattatgattcattatatttcgcccacctctcttacaattttctctaatgatgttttaatactttctacttcttgctctttagttgaaaaatctatggcatgaatataaatttttgtacgatcatcacttacaccaagcactacagtaccaggtgttaatgtaattaaattagacagcaagacaatttgccaatctttttttaaatctgtgtgataaacaaagaatcctggttcatttttaatcgaaggtttaataataattttcaaaacatcaaaattagctttaatcagttcgattaagaaaataataactaatttaataatacgatatagcgtgatgacataaaatctacctggtaacactctgtgtaagaggtaaacaagaactaggccaaagatgaaacctaacacaaagttatttgttgtgtaactatttgttacaaacaaccaaaacactgcgataataaagtttaatactaattgtacagccatgttatttacctcctaatacagctttaacgtaggttgatggattgtagaatgtttctgcaccagcttttaccattggatataagtaatctgctgacaatccatataaaacagttatcacaactgcaacgattgcaatcgtagttaaatatttgacgtcgactttgttattaagatcatatccttttggttgaccgaaaaagccttgtaggaatatgcgaatgacagaatataatacgactaaacttgataataagacgatgacaccacttaaataaaatcctctttcaaatgttgattggacaatgaaaaattttccataaaagccactgagtgggggaatgccagctaaacttaatgctgcgataaagaatgaccaaccaagtacaggatatcgtttaattaagccaccaaattgtcttaaatcagcagtgcctgtaattttaatcataattccgataagcaagaataatgcaagttttactaacatgtcgtgcaatgtatagtaaatagccccaatcatacctgactctgtcatcattgcaacgccgactaagatcacacctacagcaatcatgacattgtataggatgatttttttaatgttggcatatgcaacagcaccgacacaaccaaagatgatcgttaatagtgctaagaataaaatgacataatgtgaaaagcttacattatcactaaagaataggcttaatgttctagcgattgcataaacaccaacttttgttaacaaagcaccaaagaatgcaatgattggaattggtggtgcatagtatgcactaggtaaccaaacaaacattgggaatacgccagcttttgtagcaaaaacaaagataaatagtatgaaaacgatattgactaagccactgtcatgcgctgaaaggttagctaatttattgcttatatctgctagattcaatgttcctactactgaatataaaatcgctacacccattacgaagaaggatgacgatacaacgttaacaagaacatatttgattgtttcttgtagttgaatttttgtagaaccaattactaataagaaataagatgacattaaaaatacttcgaaaaatacgaataggttgaaaatgtcaccagttgtgaatgcaccaatgatacctattaacataaatagtactgaaaaataataataatatctttcacgttcaataccaattgtttggtatgaatataaaatcacaatagctgtaataataatactagtaattattagtagggcactgaatatgtctaatacaaagacaatactgtatggtgctttccatgaacctagctctacgcgtattggtccatgtttaacaacatttgctaaattgataattgccgcgaccaaggttaataatgtaccgcctagtgcgacataacgctttataataggacgctttccaataaagacaagtaatatggctgtaattactggaataactagcgttaacacaagcatattactttcaatcatcttctggaactcctttcatactctcaacgttatctgtgcctaattctttatatgttctaaatgctaatactaagaaaaaggctgttgtcgcaaaggcgataacgattgctgttaaaataagtgcttgcgggataggatcaacatagctttttacgttcgcttcataaattggaacagtaccatgtttaagtccgcccatagttattaaaaataagtttgctgcatgtgttaatagtgtagttcccataacaattcgtatcagacttttagacaaaacgagatagacactaattgctgtgagaataccactaacaaaaatcataataatttccactattcgttctctccaatcgaaataataattgtcatgacagtaccaactactgcacataaaacaccgaaatcaaagaatactgctgttgtcatatgaacaggttctaatataaataacggtatatcaaatgtgacatgcgtaaagaaatttttgcctaaaaaccaacttgcgataggcgtcgcaatacaaaaaactaatccgatacctatcaagattttaaaatctaatgggaaaattttacgcattgtttctatatcaaatgcaatcgtaatgataacaagtgaacttgcgaataataatccgccgacgaaaccgccaccaggtgtataatgtcctgctaagaaaagtgaaaaaccaaagaccattaccatgaaaaagataataactgcagcaaattgcaaaattagatcattttgttgtctattcatgatttttcacctcgttaccttgcgtttgacgctttttacgtaatttaatcattgtatatacagctaatcctgcgataccaagcacagatgactcgaataaagtatccataccacggaaatcaacaagtatgacgtttaccatgtttttaccgtgagctaaatcataaacgtgctcttgataaaacttagatatcgattcaaaatgtctatttccgtatgcaattaaaccgataataatgacggacaaaccaacaccaccagcaattaaagcattagtaagctggaatgagcgcttttcattataacgatttaaatttggtaagtggtagaagcataataagaacaatgctgttgaaatagattcaacgacaaactgtgtcaatgctaagtcgggtgctttaaagaatataaacaatacagacacagcatatccaactgcacttaacataataatgctaaataatcttgatttagcgaaaagaattaaaaaggcagcacttaataataaaattacgatacaaacttcgaaaattctaatcggactaacgtctttaaaattaatgttgaaaggcactgagaatatagtgacaaatgttaataaaattaatgcaccaaaaatgataactaaattattacgtgaataatcggtaacatagctattcgtcatcttttcagagtagtttggaataacatttgcacttctgttgtaccaataattgaatgttagtttaccaggttgtcgttgcaacaatttcacccaataactaaatgtcacaattagtaagatacctaaaatataaatcactaatgttgataaaaaggcaggcgttaatccatggaacatatggaattcaacatcatcaattaccgtatgattaatcgaagatgtagctggttcaataatcgaattagttaaaatgccagggaataaacccaatacaattactaatgtagctaaaatagctggtgataaaagcattaatattgatacttcgtgtgcttttttaggtaattgttcaggtttatattgtccgaaaaatatatgcattataaatttaattgaatatacaaatgtgaagacactgcccactataccaatgattgggaataggtagcctaatgtatcaacactgaataaatttgcttggcttgctgtaaatgttgtttctaaaaatgattcttttgataagaaaccattgaacggtggtacaccagccatacttaatgctgtaataacagtgattgtaaatgaaataggcataattgttagtaagccacctaatttcttaacatcacgtgtaccagtagaatgatccactgcacctgtaatcataaatagggcacctttaaatgttgcatggttgattaaatggaatattgcagccgtaaatgcagcagcatatattttgctatcatcgccttgatagtgataactaatggcaccgattccaagcatcgccataatcatacctaattgggatactgttgaaaatgccagtatacctttcaagtcttgttgttttgttgcgtttagcgaagcccagaataacgtaattaaaccaacgagtgtgacagtccatacccaaccttgcgatgctgcgaagattggtgtcattcgagcgattaaatataaccctgctttaaccattgttgctgaatgaagataagcactgactggtgtaggtgcttccattgcatctggtagccaaatataaaatggaaactgagcagattttgtaaaagcaccaatcatgattaaaatcatcgcaaaaatgaagaatgggctattttgaatttcagaagcatgttgaatcatgtactgaatgctaaatgattgtgttggtatagcgagtaagatgataccacctaataatgatagaccaccaaatactgtgattatgagcgatttttgagcaccatatatagatgcttgtcgttcgcgccagaatgaaataagtaaaaaactagaaaatgacgttagctcccagaataaatatagaataataacattatctgaaagtacgacacctaacattgcacccataaatagtaataaataacaataaaaattccctagttgttctgacttacttaagtagccgattgaatataatactactaaactgccgattcctgaaataagcaaactaaagagtaaacctaagccatcaagatataaatcaaagttcataccaaaatgaggcatccaatttaaggttttcattacagtattacctgacatcgtcgttttaattaatgtaagcatataaataaatatgacgatagggacaggtaatacgaaccatcctaaatgtatacgtttaaaaaatctatacaggataggaataatgagtgcgaatattaacggtaatatcaccgcaatatgtaacaaactcactatgttgtcctcctttaaaaaatatttatgttattcattatacatgaatgatatagttctgaaaaacgtacacactccttgttgtgctttattttcagaagtatttaaataagaagaaacacgtcattttttatttaaaattttctttgtattgaagtgaataatcttcttttaagcgtgctaaactagctaaagacatttcagcatgttttgtttgctgagctttaagtttagtttctaaatctgtaattgcttgttgaagtgaatcttcatagcgcaatacatcaacattgaagtcgcgtaattgtgaacgtttcgtatagcgtttttcaaaatggcttaatgctttgcgttcatggaaaaatacaccttcagtttcagtagggttatgtaaatcaccttgtttcgggtgtttgataacttgttcaactttaacaaggacatcgtctccattttcttcaacaatcgtgacaccatagctacctgttttgtgtgaaaatcgatatagcttcatgctattttcctcccttaaaagtatgttaatatatatgtatcataacatgaatggagaatataaatggctaactatccacagttaaacaaagaagtacaacaaggtgaaattaaagtggttatgcacacaaataaaggtgacatgacattcaaattatttccaaatattgcaccaaaaacagttgaaaattttgtgacacatgcaaaaaatggttattatgatggaataacattccaccgtgtcattaatgacttcatgattcaaggtggcgatccaacagctactggtatgggtggcgaaagtatttatggcggtgcttttgaagatgaattttcattaaatgtatttaacttatatggcgcattatcaatggctaactcaggacctaatactaatggttcacaatttttcattgttcaaatgaaagaagtacctcaaaatatgttaagtcaacttgcagatggtggctggcctcaaccaatcgttgatgcatatggcgaaaagggtggtacaccatggttagatcaaaaacatacagtattcggtcaaatcattgatggtgaaactactttagaagatattgcaaatacaaaagtgggaccacaagacaaaccacttcatgatgttgtaattgaatctattgatgttgaagaataatagctaaacataattaactaccaacattttaaactcggataaagctaatttatgaatggattagtatatattccaacgaaacaaataaactaacatgatgagcaatctcaatatatttatcaagaaagcacagtttttaaatagatgtgtattctaaagataatagttgaggttgctttttatgtttttaaagagaattgctattcaaatagttaataaattgaaaacaaagtagctggatatcatattgatttagataggagtttgttgctaattttatttgtaaatccaagtttgtagaattcttattcatttataaaataatattcgtatgatttgatgttttaattagtccaccatttcgatttgtgctatgataatagtgttaagtaaacgaaataaggggttattaagttgaataactacaaaattggccaacatatcaaggtgcgtgtaactggtattcaaccatacggtgcgtttgttgagacccctaatcatactgaaggactgattcatatatcagaaattatggatgactacgttcataatttgaagaaatttctatcagaaggccaaattgttaaagctaaaattttgtctatagatgatgaaggaaagcttaatctatcattaaaggataatgattacttcaaaaattatgagcgtaagaaggaaaaacaatcagtattagatgaaatcagagaaacagaaaaatatgggtttcaaacacttaaagaacgcttaccaatctggataaaacagtcaaagcgagcaattcgaaacgactaaaggaacagataaatcgtaccgaaaatcatacaaagggtctgaaatgaaagtttcttagactataaaagagattagtatctattaaattttattagatactaatctctttttgtctacgataacgtaatatgattgattctatttacacgtacaaatggtttaaggtgacatatccattatctttgttagatagaatcgttgatttgcaatattgtatgtggatttgttttttttatttattttagaaatgagaactacaacttaaagtattaaacgaattgcaactatataaacagataattggagaatgaaaaaattacatgttatagtcaactcaataattttaaggaggaattaagtaatgaaaagtaaatacgaaccattgtttgataaagtagaattaccaaatggagtagagttgagaaatcgatttgtgttagcccctttaacacatatttcttcaaatgatgatggtactatttcagatgtagaacttccttatattgaaaagcgttcacaagatgttggtattacaattaatgctgcgagtaatgtgagtgatgtcggaaaagcatttccaggacagccgtcaatcgcgcatgacagtgatattgaaggactaaaacgattagctacagcaatgaagaaaaacggtgccaaagcactcgtacaaatacatcatggtggtgcacaagcattgcctgaattaatacctgatggagacgtcgtagcaccaagtccaatttctttaaaaagtttcggtcagaaacaagaacatagtgctagagaaatgacgaatgaagagattgaacaagcaatcaaggattttggtgaagcaacacgacgtgcaattgaagcagggtttgatggtgttgaaatacatggcgcgaatcattacttaattcatcaatttgtatcaccatactataatagaagaaatgatgtatgggcaaatcaatataaattcccggtcgctgtgattgaagaagtgcttaaagcgaaagaagcgtatggcaataaagactttatagttggatacagattatctccagaggaagcggagtctccaggaatcacaatggaaattacagaggaactcgttaataaaattagccatatgccaatcgactatattcatgtttcaatgatggatacgcatgcaacgacacgtgaaggtaaatacgctggacaagaaagactacctttaattcacaaatggataaatggtcgtatgccacttatcggtattggttcaattttcacagctgacgaagctttagatgcagttgaaaatgttggtgttgacttagtagccattggtagagagctactactggattatcaatttgttgaaaaaattaaagatggacgggaagatgaaattattaattactttgatccagagagagaagataatcatcacttaactcctaatttatggcatcaatttaatgaaggattctatccattaccacgtaaagataaataagtgtttaactgttaccactaatgatattgtgtatgcaatttgttagtggttttcaatatttataaataaaaatattcttagtaaaatacacttttgattaagtgtaaaattatcaattcttttgcttgtaatcatttaagtaattatgtcattataaatgtaagggttttcaaaatagacaaatttaatgaaacttagtgattatttcatcttttttggtggaaaagtatctgctttgaaaactaatgtaattatttggataatgtttcatgtataatagttataaatgatgaaaaggggagatatgatgactaaatctgaaaaaattattgagttaacaaatcattacggagcacataattatttaccattgccaattgtcatttcagaagctgaaggggtatgggttaaagatcctgaaggcaataaatatatggatatgttatctgcatattccgctgttaaccaaggtcatagacatccgaaaattattcaagcattaaaagatcaagctgataaagtgactctagtttcacgtgcttttcatagtgataacttaggtgaatggtacgaaaaaatttgtaaactggcaggtaaagataaagctttaccaatgaatacaggtgctgaagcagtagaaacagctttgaaagcagcacgacgctgggcatacgatgttaaaggaattgagccaaataaagcagaaatcattgcatttaatggtaacttccatggtcgaacaatggcgccagtttcattatcttcagaagcagaataccaacgtggttatggtccgttattagatggatttagaaaagttgattttggagatgtagatgcattggaagctgcaattaatgaaaatactgcagcagttttagtagaaccaattcaaggtgaagcgggtataaatataccgccagaaggatatttgaaagcaattagagaattatgtgatgaacataatgtcttatttattgctgacgaaatccaagcaggattaggtcgttcgggtaaattatttgctacggattgggataatgtaaaacctgatgtctatattttaggtaaagcactaggtggtggtgtcttcccaatttctgttgtattagcagataaagaagtattagatgtctttacacctggctcacatggttcaacatttggtggtaatccacttgcttgtgctgcatcaattgctgcattagatgttatcgttgatgaggatttaccagggcgctctttagaattaggagattattttaaagaacaattaaagcaaattgatcatccatcaattaaagaagtccgtggacgtggtttgtttataggtgtggaacttaatgaaagtgctagaccatattgtgaagctttgaaagaagaaggcttattatgtaaagaaacgcatgatactgtcattcgttttgcaccaccattaattattactaaagaagaattggaccttgcacttgaaaaaataagacatgtatttcaataatgtcaaaaagttgtaacaatcagtttgtaagggctttaaaaaggaatacgttatgttacaatatgtttgaaagcgaaatcattaggtaaagaagaggcgaaaaggatcatgactgagaacaataatttagtaacttctactcaaggaattattaaagaagcattgcataaattgggatttgacgaaggaatgtacgatttaattaaagaacctttaagaatgttacaagtgcgtatccctgtacgaatggatgatggcacagttaaaacattcacaggttaccgtgcgcaacataatgatgctgttggaccaacaaaagggggcgtgcgtttccacccagatgttgatgaagaagaagtaaaagcattatcaatgtggatgactttgaaatgtggcattgtaaacttaccatacggtggtggtaagggtggtatcgtttgtgatccacgtcaaatgagcattcatgaagttgaacgtttatcacgcggatatgtaagagcaatttcacaattcgtaggtccgaacaaagatattccagcaccagatgtatttacaaactcacaaattatggcttggatgatggatgaatatagtgcattagataaatttaattcaccaggtttcatcacaggtaaaccaattgtattgggtggttctcatggacgcgacagatcaactgcactaggtgtagttattgcaattgaacaagctgcaaaacgtcgtaatatgcaaattgaaggtgccaaggttgttattcaaggtttcggtaatgccggaagtttcttagctaaattcttatatgatttaggtgcaaaaattgtaggtatctctgatgcttacggtgcattacacgatccaaatggcttagatatagattatttattagaccgtcgtgatagttttggtacggtaacaaatttatttgaagaaacaatctcaaataaagaattgtttgaattagattgtgacattttagtaccagcggctatttcaaaccaaattacagaagacaatgcacatgatattaaagctagtatcgttgttgaagctgctaatggacctacaacaccagaagcaacacgtattttaactgaacgtggtatattattagttccagacgtattagcaagtgctggtggtgtaacggtttcttacttcgaatgggtacaaaataatcaaggttattattggtctgaagaagaagtaaatgaaaagctacgtgaaaaattagaagcggcatttgacacgatttacgaattgtctcaaaatcgaaaaatagatatgagacttgcagcatatatcataggtattaaacgtacagcagaagcagctagatatcgtggttgggcataattaattatcatatgtgatttaacgagcttgggacagaaaacaaagccctaagctcgttaattttattttagcagcagttgactgtaaaacaatgcccgtgtaacacgctcttttcaaaaatagtcggggccccaacacagaggctggtggaaagtcagcttacaatagtgtgcaagttggctggcccccaacactgagaatttttaattaaaccaggctgggacataaatcaatgttctatgctctacgaagttatattggcagtagttgactgaacgaaaatgcgcttgtaacaagcttttttcaattttagtcaggggccccaacacagagaatttcgaaaagaaattctacagacaatgcaagttggcgaggccccaacactgagaatttctaattaaacgctcaactatatatagttgatcaaaaagacagcagtaggataatttcaatttggaaatatcttactgctgttttttatagtaatagctatatttttgtatttatgttttctagtttaacaatactacttaatgacttctttatatttatcagcgaaatttgtaaagacaccatcaacgccatatttatttaatcgtaacatatcagctttttcattcactgtataaggatgtactataaatcctaagtcttttaaatgatgggtattttgttcagttaaatctgtataatcaggacctaatccaatcgcataagagcgtatctcttttaagcgttggtcgttaaattgttgtagttcacctttatcaactaattttactaatggcacatgcttattttgacgatgaattttctttaaactttcgtcagaaaatgattgaatcattacatgtccattttttaatttattgttatttaaaaggtgatgctttttcaatgaagctaataattgttcttccattcctgggtatacatcaggtgactttgtttcaatataatagtttgcattcgggccataacgttctaaaatttcatctaaagtgggtactttagcatttttataacttgctcttgcgtattttggatattttttattaaaccaacttcctgcatctaactgttttaattcatcaagggtataatcctcaactttaccgtgtccatttgttgtacggttaacagtttcatcatgcatagcaactaaatgtccatctttggtacgttgtaaatcaatttcgatataagatgcttttaactcattatgactcttatcatatgcttgaaacgtatgctctggtgcatagccacttgcgccacgatgtgcgatagtagtgaatcgctcattcgttaaatttgtatgccattgaatagcctgaggtttatttgcaatttgatttgtttgttcagcgccagcagtaggtactgataaaaatcccatagtaaaaacagcagaagcagccataaatttagtgaagcttttcgaagagttagtcatagtctttatcctttcatctctttatttgtagtctaacaattttaaaatactacaaaaacctgcttgtgaaaacgctttacacatttcttttacaatttataacatttctgtaatataaatttaaaagaattatcaaacattttaggaatcttaaaaatgtgatgttcaacaagacgaagagagcattaaaatacccacaatgtaattttaatagacattgtgggtaggtagattaacgtatttattgtgatagtaattgtttagcaacatcaagttgttgtttgaccgatgattgccccgttgacccgtaactttgacgtcgtttcaagcaattttcaggctgcaaataatcgtaaatatcggcatcgatactagaatgatgttgttgatatgttgctaaaggaacatctaataaataatgaccttgttgtatacattctaagacgatttttcctacaatttcatgtgcagttctaaatggaatatttttagttactaaataatctgctagttccgttgcatttgaaaaatcttctttaacagtttgattgagtcgttctttattaattgtcatcgtttgaatcataccttcgaaaatacgtaaagaacctttaattgtatggacagcatcgaataaaccttctttatcttcctgcatatctttgttatatgctagaggtaatccttttaaagtcataagcatgctcattaaatgaccagtcgttcgaccaactttacctctaattaattctgccatatcaggatttttcttttgtggcataatagatgagccagttgaaaatgcatctgataatgtaatgaatttagcttcgtctgtggaccagaaaataatttcctctgcaaagcgtgataagtgaaccatcgttaaagaaatattatgcaatgtttcaataatatagtctctgtcactaacagcatctaggctattctcatagagactgccaaagttcaacaatgctgttgtctcgtgtctatcgatagggtatgtggtaccacttaaggctgctgcacctaaaggattaatatcgattcgttttaaactatcttcaaatcgttgttggtctcgttgtaacatccaaaaataagtcataatatgatgtgcaaatgaaattggctgtgcacgctgtaaatgagtataaccaggcataattgtatcaacattattggaagcgatgtctacaattacactttgtaacgacttaattaatgcgatgatatcttgcacttgtttcttagtgtacaagtgcatatctgttgcaacttgatcgtttctactgcgtccagtatgcaacttaccaccagcatcaccaatacgtttaattaattcatgttcaatatttaaatgaatatcttctaatgatgcactaaattgaatttgatcttgatgataatcatgttgaatagattttagtccttgtataatttgttcgctgtcttgttgactaataatgccttgattcgcaagcatagttgcatgcgcaatgctgccttcgatatcttgatctatgagcgtttggtcaaaagtaatggatgcgttaaagtcgtcaacccactcttcaggttgtacttcaaatctaccgccccaagctttattgctcattgctatagcctccatgcaacatcgcatttacttgagtaggtaaaccatagatatcgataaagccaacagcagcgtcttgattaaatgcatcttcttttgtataagttgctaatttttcatcatataatgtgtaaggtgattttctaccattcacgatggcattacctttgaataatttaattctgacatcaccacttacgtattgctgagtactatcaataaataatttcaagctatcagttaaaggtgagaaccaaagtccattgtatagttgttcagcaaattgcttctcaatgattggtttaaagtgtgcgacatctttagttaacgtaatcgtttctaatgctttatgcgcttttaaaataacttctgcagcaggtgcctcataaatttctcttgatttgatacctacaagtctattttctacatggtcaattcttccgataccatgcttaccagctaatgcattcaacgttaaaattaaatcgtctaattcatatgttttgccatcaatttgaactgggatgcctttatcaaacgttaaaatgatttcatcagcagtatctggtgtttcttctaaagcatttgttagatcgaacgcatcctctggtggcgcagcataaggatcttctaaaataccacattcattcgctctgccccatagattttgatcgatagaataaggtgaatcatggttgattgatacagggatattatgtttaattgcataatcgatttcttcttcacgactccatgcccactcacgtacaggtgcgaatgctttcaatgatgggtttaatgctttaatggcaacttcgaaacgtacttggtcattccctttaccagtacaaccatgtgcaatacctactgaatttgttttctcagcaatctctactaattttttagcgattaatggtcttgataaagctgaaactaatggatatgcattttcatacattaaatttcctttgattgcataacttacatactcatcactaaattcttttgttgcatcaataatatgacattcaactgctcccatatctaaagcttttttataaacgatgtctaaatctttaccttcaccaacatctaggcaacaagctacaacgtcgtatcctttgtcgataagccattgaacggccacacttgtatctagtcctcctgaatatgctaaaacaattttctctttcataaaattcacctcattgtagttatctgaatatttcgtatgaacacatgatagcaaacttttaatgaaaataaaaccattattttacatatttattcataaaatgcgatagagatagttagagttgtaagtataaatgcttatttatcaatgtttaaaagtattttaaaaaacatgcaaattgtataaaaaatgtttgagtgtttgacgccagtttgaaatgtttgttgaaaaataggtgtgaaacgtcacataaatatcaattttattgattaagtacaaacttgtgaattgaatcgcaaacgtaaacttagtaaaattaagatattaaatgaaacaggaggcttttatagatgactcatattcaattagattttagtaaaacgttagaatttttcggtgaacacgaattaaaacaacaacaagaaattgttaaatcaattcacaaaacaattcatgaaggtactggtgcaggtagtgacttcttaggctgggttgatttaccagttgattacgacaaagaagaattttcaagaattgttgaagcatcaaaacgcattaaagaaaattctgatgttttagtagtcatcggtattggtggttcttacttaggtgcacgtgcagcaatcgaaatgttaacgtcatcatttagaaacagcaatgaataccctgaaattgtatttgttggtaatcacttatcatcaacatatacgaaagagttagttgattatttagcagacaaagatttctctgtaaacgttatttctaaatctggtacaactacagaaccagcagttgcatttagattgttcaaacaattagttgaagaaagatacggtaaagaagaagcacaaaaacgtatatttgcaacaacggataaagaaaaaggtgctttaaaacagttggctacaaacgaaggttatgaaacgtttatcgtacctgatgatgtaggtggaagatattctgttttaacagcagtaggattattaccaattgcaacagctggaattaacatcgaagctatgatgattggtgctgcaaaagcacgtgaagaattatcttcagataaattagaagacaacattgcataccaatatgcgacaattcgaaacattttatatgcaaaaggttatacaacagaaatgttgattaactatgaaccatctatgcaatactttaatgaatggtggaaacaattatttggtgaatcagaaggtaaagacttcaaaggtatctatccttcaagtgccaactacacaactgatttacattctttaggtcaatatgtacaagaaggccgtcgtttcttattcgaaacagtggtaaaagtaaatcatcctaaatatgatattactattgaaaaagatagtgatgatctagacggattaaattatttggctggtaaaacaatcgacgaagttaacacaaaagcattcgaaggtacattattagcgcatactgatggtggtgttcctaacatggtagtgaacattccacaattagatgaagaaactttcggttatgtcgtatacttcttcgaacttgcttgtgcaatgagtggataccaattaggtgtaaatccatttaaccaacctggtgtagaagcatataaacaaaacatgttcgcattattaggtaaacctggttttgaagacttgaaaaaagaattagaagagcgtttataaaatacattacttcaatgattagtgaagtttgaaaagatagaactagacgttaactatttaaagcatattttcgaggttgtcattacaaatgtaaaaatgtaatgacaacctcgtttttatttatatgcaagaactaggttactagctaatgtgacaagatgttaagagaaaattaaagaaaaaataacatctgtcatacaataatattgttatactactagagactgatttattagcatgattacatgttaatgtttctttacttagtaattaactttataatgtaagaataattatcttcaaccaaagaaagggattgatgatttgtcgtttcatcaagtagaagaatggtttgagatatttcgacagtttggttatttacctggatttatattgttatatattagagcgataattccagtatttcctttagcactctatattttaattaacattcaagcttatggacctattttaggtatattgattagttggcttggattaatttctggaacatttacagtctatttgatctgtaaacgattggtgaacactgagaggatgcagcgaattaaacaacgtactgctgttcaacgcttgattagttttattgatcgccaaggattaatcccattgtttattttactttgttttccttttacgccaaatacattaataaattttgtagcgagtctatctcatattagacctaaatattatttcattgttttggcatcatcaaagttagtttcaacaattattttaggttatttaggtaaggaaattactacaattttaacgcatcctttaagagggatattaatgttagttgtgttggttgtattttggattgttggaaaaaagttagaacagcattttatgggatcgaaaaaggagtgacatcgtgaaaaaagttgtaaaatatttgatttcattgatacttgctattatcattgtactgttcgtacaaacttttgtaatagttggtcatgtcattccgaataatgatatgtcaccaacccttaacaaaggggatcgtgttattgtaaataaaattaaagttacatttaatcaattgaataatggtgatatcattacatataggcgtggtaacgagatatatactagtcgaattattgccaaacctggtcaatcaatggcgtttcgtcagggacaattataccgtgatgaccgaccggttgacgcatcttatgccaagaacagaaaaattaaagattttagtttgcgcaattttaaagaattagatggagatattataccgcctaacaattttgttgtgctaaatgatcatgataacaatcagcatgattctagacaatttggtttaattgataaaaaggatattattggtaatataagtttgagatattatcctttttcaaaatggacgattcagttcaaatcttaaaaagaggtgtcaaaattgaaaaaagaattattggaatggattatttcaattgcagtcgcttttgtcattttatttatagtaggtaaatttattgttacaccatatacaattaaaggtgaatcaatggatccaactttgaaagatggcgagcgagtagctgtaaacattattggatataaaacaggtggtttggaaaaaggtaatgtagttgtcttccatgcaaacaaaaatgatgactatgttaaacgtgtcatcggtgttcctggtgataaagtagaatataaaaatgatacattatatgtcaatggtaaaaaacaagatgaaccatatttaaactataatttaaaacataaacaaggtgattacattactgggactttccaagttaaagatttaccgaatgcgaatcctaaatcaaatgtcattccaaaaggtaaatatttagttcttggagataatcgtgaagtaagtaaagatagccgtgcgtttggcctcattgatgaagaccaaattgttggtaaagtttcatttagattctggccatttagtgaatttaaacataatttcaatcctgaaaatactaaaaattaatatgaaacaaatacaacatcgtttgtcggttttaatactgataaacgatgttttattttgttagtaccacaataaaagctaagttcgaaatgaacttataataaatcaatcacaatcactttgtgttaaaatatgtgtcaaaggaagtgagggtttgtcatgacattacatgcttatttaggtagagcgggaacaggtaagtctacgaaaatgttgaccgaaataaaacaaaaaatgaaagcagatccgcttggagatccaatcattttaattgcgccaactcaaagtacatttcaattagaacaagcctttgtcaatgatccggaattaaatggtagtttaagaacagaagtgttgcattttgaacgattaagtcatcgtattttccaagaagttggtagttatagcgaacaaaagttatctaaagctgcaacggaaatgatgatttataacattgttcaagaacaacaaaagtatttaaaactttatcaatcacaagcaaaatattatgggtttagtgaaaaattaacagaacaaattcaagattttaaaaaatatgcagtaacgcctgaacatttagaacactttattgctgataaaaatatgcaaactcgaactaaaaataagttagaggatattgctttaatataccgtgagttcgaacaacgcattcaaaacgagtttattactggtgaggattcattacaatattttattgattgtatgccgaaatcagagtggctaaaacgtgctgatatatatattgatggttttcacaacttttcaacgattgagtatttaataatcaaaggattaattaaatatgcgaagagtgtcacaattatattgacgacagatggtaaccacgatcaatttagtttatttagaaaaccatcggaagtgttacgacatattgaagaaatagcaaatgaactcaatatttctattgaacgtcaatatttcaaccaattatatcgcttcaataatcaagatttaaagcatcttgaacaagaatttgatgtacttcaaatcaatcgagtggcatgtcaaggtcatatcaatattttagaatctgcgactatgagagaggaaataaatgaaattgcgcgacgtatcatcgttgatattcgtgataagcaattacgatatcaagatattgcaattttatatcgtgacgagtcttatgcttatttatttgattccatattaccgctttataatattccttataacattgatacaaagcgttcgatgacacatcatccggtcatggaaatgattcgttcattgattgaagttattcaatctaattggcaagtgaatccaatgctacgcttattgaagactgatgtgttaacggcatcatatctaaaaagtgcatacttagttgatttacttgaaaattttgtacttgaacgtggtatatacggtaaacgttggttagatgatgagctatttaatgtcgaacattttagcaaaatggggcgtaaagcgcataaactgaccgaagatgaacgtaacacatttgaacaagtcgttaagttaaagaaagatgtcattgataaaattttacattttgaaaagcaaatgtcacaagcggaaactgtaaaagactttgcaactgctttttatgaaagtatggaatatttcgaactgccaaatcaattgatgacagagcgagatgaacttgatttaaatggtaatcatgaaaaggcggaggaaattgatcaaatatggaatggcttaattcaaatccttgacgacttagttctagtatttggagatgaaccaatgtcgatggaacgtttcttagaagtatttgatattggtttagaacaattagaatttgtcatgattccacaaacattagatcaagttagtattggtacgatggatttggctaaagtcgacaataagcaacatgtttacttagttggaatgaacgacggcaccatgccacaaccagtaactgcatcaagtttaattactgatgaagaaaagaaatattttgaacaacaagcaaatgtagagttgagtcctacatcagatattttacagatggatgaagcatttgtttgctatgttgctatgactagagctaagggagatgttacattttcttacagtctaatgggatcaagtggtgatgataaggagatcagcccatttttaaatcaaattcaatcattgttcaaccaattggaaattactaacattcctcaataccatgaagttaacccattgtcactaatgcaacatgctaagcaaaccaaaattacattatttgaagcattgcgtgcttggttagatgatgaaattgtggctgatagttggttagatgcttatcaagtaattagagatagcgatcatttaaatcaaggtttagattatttaatgtcagcattaacgtttgacaatgaaactgtaaaattaggtgaaacgttgtctaaagatttatatggtaaggaaatcaatgccagtgtatctcgttttgaaggttatcaacaatgcccatttaaacactatgcttcacatggtctgaaactaaatgaacgaacgaaatatgaacttcaaaactttgatttaggtgatattttccattccgttttaaaatatatatctgaacgtattaatggcgattttaaacaattagacctgaaaaaaataagacaattaacgaatgaagcattggaagaaattttacctaaagttcagtttaatttattaaattcttcagcttactatcgttatttatcaagacgcattggcgctattgtagaaacaacactaagcgcattaaaatatcaaggcacgtattcaaagtttatgccaaaacattttgagacaagttttagaaggaaaccaagaacaaatgacgaattaattgcacaaacattaacgacaactcaaggtattccaattaatattagagggcaaattgaccgtatcgatacgtatacaaagaatgatacaagttttgttaatatcattgactataaatcctctgaaggtagtgcgacacttgatttaacgaaagtatattatggtatgcaaatgcaaatgatgacatacatggatatcgttttacaaaataaacaacgccttggattaacagatattgtgaaaccaggtggattattatacttccatgtacatgaacctagaattaaatttaaatcatggtctgatattgatgaagataaactagaacaagatttaattaaaaagtttaagctgagtggtttagtgaatgcagaccaaactgttattgatgcattggatattcgtttagaacctaaattcacttcagatattgtaccagttggtttgaataaagatggctctttgagtaaacgaggcagccaagtggcagatgaagcaacaatttataaattcattcagcataacaaagagaattttatagaaacagcttcaaatattatggatggacatactgaagttgcaccattaaagtacaaacaaaaattgccatgtgctttttgtagttatcaatcggtatgtcatgtagatggcatgattgatagtaagcgatatcgaactgtagatgaaacaataaatccaattgaagcaattcaaaatattaacattaatgatgaatttgggggtgagtaatagatgacaattccagagaaaccacaaggcgtgatttggactgacgcgcaatggcaaagtatttacgcaactggacaagatgtacttgttgcagccgcggcaggttcaggtaaaacagctgtactagttgagcgtattatccaaaagattttacgtgatggcattgatgtcgatcgacttttagtcgtaacgtttacaaacttaagcgcacgtgaaatgaagcatcgtgtagaccaacgtattcaagaggcatcgattgctgatcctgcaaatgcacacttgaaaaaccaacgcatcaaaattcatcaagcacaaatatctacacttcatagtttttgcttgaaattaattcaacagcattatgatgtattaaatattgacccgaactttagaacaagcagtgaagctgaaaatattttattattagaacaaacgatagatgaggtcatagaacaacattacgatatccttgatcctgcttttattgaattaacagaacaattgtcttcagatagaagtgatgatcagtttcgaatgattattaaacaattgtatttctttagcgttgcaaatccaaatcctacaaattggttggatcaattggtgacaccatacgaagaagaagcacaacaagcgcaacttattcaactactaacagacttatctaaagtatttatcacagctgcctatgatgctttaaataaggcgtatgatttgtttagtatgatggatggcgtcgataaacatttagctgttatagaagatgaacgacgtttaatggggcgtgttttagaaggtggttttattgatataccttatttaactgatcacgaatttggcgcgcgtttgcctaatgtaacagcgaaaattaaagaagcaaatgaaatgatggtcgatgccttagaagatgctaaacttcagtataaaaaatataaatcattaattgataaagtgaaaaatgattacttttcaagagaagctgatgatttgaaagctgatatgcaacaattggcgccacgagtaaagtaccttgcgcgtattgtgaaagatgttatgtcagaattcaatcgaaaaaagcgtagcaaaaatattctggatttttctgattatgaacattttgcattacaaattttaactaatgaggatggttcgccttcagaaattgccgaatcataccgtcaacactttcaagaaatattggtcgatgagtatcaagatacgaaccgggttcaagagaaaatactatcttgcatcaaaacgggtgatgaacataatggtaatttatttatggttggagatgttaagcaatccatttataaatttagacaagctgatccaagtttatttattgaaaagtatcaacgctttactatagatggagatggcactggacgtcgaattgatttgtcgcaaaacttccgttctcgaaaagaagtactgtcaacgactaactatatattcaaacatatgatggatgaacaagtcggtgaagtaaaatatgatgaagcggcacagttgtattatggtgcaccatatgatgaatcggaccatccagtaaacttaaaagtgcttgttgaagcggatcaagaacatagtgatttaactggtagtgaacaagaagcgcattttatagtagaacaagttaaagatatcttagaacatcaaaaagtttatgatatgaaaacaggaagctatagaagtgcgacatacaaagatatcgttattctagaacgcagctttggacaagctcgcaatttacaacaagcctttaaaaatgaagatattccattccatgtgaatagtcgtgaaggttactttgaacaaacagaagtccgcttagtattatcatttttaagagcgatagataatccattacaagatatttatttagttgggttaatgcgctccgttatatatcagttcaaagaagacgaattagctcaaattagaatattgagtccaaatgatgactacttctatcaatcgattgtaaattacattaatgacgaagcagcagatgctattttagttgataaattaaaaatgtttttatcagatattcaaagttaccaacaatatagtaaagatcatccggtgtatcagttaattgataaattttataatgatcattatgttattcaatactttagtggacttattggtggacgtggacgacgtgcaaacctttatggtttatttaataaagctatcgagtttgagaattcaagttttagaggtttatatcaatttattcgttttatcgatgaattgattgaaagaggcaaagattttggtgaggaaaatgtagttggtccaaacgataatgttgttagaatgatgacaattcatagtagtaaaggtctagagtttccatttgtcatttattctggattgtcaaaagattttaataaacgtgatttgaaacaaccagttattttaaatcagcaatttggtctcggaatggattattttgatgtggataaagaaatggcatttccatctttagcttcggttgcatataaagctgttgccgaaaaagaacttgtgtcagaagaaatgcgattagtctatgtagcattaacaagagcgaaagaacaactttatttaattggtagagtgaaaaatgataaatcgttactagaactagagcaattgtctatttctggtgagcacattgctgtcaatgaacgattaacttcaccaaatccgttccatcttatttatagtattttatctaaacatcaatctgcgtcaattccagatgatttaaaatttgaaaaagatatagcacaagttgaagatagtagtcgtccgaatgtaaatatttcaattatatactttgaagatgtgtctacagaaaccattttagataataatgaatatcgttcggttaatcaattagaaactatgcaaaatggtaatgaggatgttaaagcacaaattaaacaccaacttgattatcaatatccatatgtaaatgatactaaaaagccatcaaaacaatctgtttctgaattgaaaaggcaatatgaaacagaagaaagtggcacaagttacgaacgagtaagacaatatcgtatcggtttttcaacgtatgaacgacctaaatttctaagtgaacaaggtaaacgaaaagcgaatgaaattggtacgttaatgcatacagtgatgcaacatttaccattcaaaaaagaacgcatatctgaagttgagttacatcagtatatcgatggattaatcgataaacatattatcgaagcagatgcgaaaaaagatatccgtatggatgaaataatgacatttatcaatagtgagttatattcgattattgctgaagcagagcaagtttatcgtgaattaccgtttgtagttaaccaagcattagttgaccaattgccacaaggagacgaagacgtctcaattattcaaggtatgattgacttaatctttgttaaagatggtgtgcattattttgtagactataaaaccgatgcatttaatcgtcgccgtgggatgacagatgaagaaattggtacacaattaaaaaataaatataagatacagatgaaatattatcaaaatacgcttcaaacgatacttaataaagaagttaaaggttatttatacttcttcaaatttggtacattgcaactgtagtattttgattttcaaaagaataaaaaataatttcgattaagtgcaaagtccttgtagcagaatgaacacaactcattttcaaaattgtcttacttatttatttgttatttgataacgaaaaaagttataatgtgaattaagataaagatgaggagttgagaatgaatgaaattcttatcattcaagtataatgacaaaacttcatatggcgttaaagtaaaacgcgaagatgctgtatgggatttaacacaagtatttgctgactttgcagaaggagatttccatcctaaaacattgttagctggtttacaacaaaatcatactttagattttcaagaacaagtacgtaaagcagttgtagcagcagaagatagcggcaaagctgaagactataaaatttcatttaatgacattgaattcttaccaccagtaacacctccgaataatgtgattgcttttggtagaaattacaaagatcatgcgaacgaattaaatcatgaagtagaaaaattatatgtatttacaaaagcagcgtcatctttaacaggagataatgcaacaattccaaatcataaagatattactgatcaattagattatgaaggtgaattaggtattgttattggtaagtctggtgaaaagattccaaaagcattagctttagattatgtttacggctatacaattattaacgatatcactgatcgcaaagcacaaagtgaacaagatcaagcatttttatcaaaaagtttaactggcggttgcccaatgggtccttatatcgttactaaagacgaactaccattacctgaaaatgtaaatattgttacaaaagttaacaatgaaattagacaagatggtaacactggcgaaatgattcttaaaattgatgaattaatagaagaaatttcaaaatatgttgcactacatccgggagatattattgcaactggtacaccagcaggcgttggtgcaggtatgcaaccacctaaatttttacaaccaggtgatgaagttaaagtgactattgataatattggaacgctgacaacttatatcgctaaataattatcatttaaaaagctaaccagtctttatatagattggttagttttttcttgcttttctaaaaaggtgttaaagataaattatttataatgttaccattttgagatgaaagtgaaatattgatattaagaagtagttgattattttacagcagattcacaatattctaataaggaataaaatgtcatgttcttcctctcaaatatagaagtgtggtagaatatatattcgtgtataatcaaatcatgattaaattacaagcaagtgggtattaatcccaagaagctttaatttaataatataaataattaaagtggggggaatcagtatgttacatttacatatattaagttgggtattagcgattattttatttatcgctacatacttaaacatttcaaaaaatcaaggcggatcaccatttttcaaaccgttgcacatgattttacgcttatttatgctgttgacgttaatttcaggattttggatattaattcagtcatttatgaatggcggggcaaatcatatgttgcttacattgaaaatgctgtgtggtgttgcagtagttggattgatggaagtgtcgattgctaaaagaaagagacatgaacaaagtcacaaaatgttttggataacaatggcattaattatcatcacaatggtattaggtgtcattctaccgttagggcctatatcaaaattattcggtattggctaattgataagacatatagtatatgacataaggcatggacaattattagtccaagaccttatgtcttttttgattctaaaaatgtttaaacataaaaaaaggactggatagtagtaccagtccaacataattctaacctagacaattaagattagattgaatcgcatgattcatttatttagctttgtaaccaatcatattgattaaatctttagggtggctatatggtggtgcataagccacttcaaactcagttaactcatctacagttagctggttcatcattgccatcgatagtacatcaatacgtttatctgcaccttcttttcctactgcagctgctcttaaaatctgacggtttgaagtgtcataatatacccttaagtgtaaaggggaatttcctgggtaataattcgcgtgtgcaccttgagtgacttccaccattttatagtcaaattgctttagttcatttggtttaacgccgacactcgcaaatgtataatcaaagaacttcacaatattgttgcctaagaagcctttgaattcaatagtgtcatttccagcaatttgttcggcaacaatacttgctgcacggtgagcgccccaagctaaaggaacactagccggtagatcgacatgtcgataatgtgatgttgcaatatcgcctattgcataaatgtttggaacatttgtttcaaatttatcgtttaccggtatgaaaccttttcgatcaagtttgatatttgaactttcgattaattttgaattggggtgagtaccgacaccttcaataatcatatcgtaatgttcaacttttcctgatttaaatgtaatttcatttccattgatagcatcaatttcctcatttaaacggtatggaatctcccgcttatctaattcatcaagtataggttgattcatgtcagcatccattaatttatttatcttatcagatcgatgaattaaagtagggtgtaaaccacgttcgtaaagattttcaagaacttctaatgaaacataccctgcacctataaccaatactttatcaacttgatttgctttgatgaattgatcgatagcatcagtgtcttctaaatttctaagtgtaaatgtaatatcactttcaaagccaaggctatttgcacttgcaccagggcttaaaatgagtttatcgtaagattcttcaaattgttcgttggtctttctatttaatacagttacagtttgtctttcatcattgattgcaataacttcatgataagtttttactgtaatttgctttctatcataaaatttttcaggtgtatacgctaaagcatattttctatcttcaacaacttcgccaatgacataaggcaatgcacaattagcaaagctcatatcacgatctttttcaaaaataataatgtcactttctttatctaaacgtcgaatttggctggcacatgttgcaccgccagcgactgctccgactacgactattttgggcatcgtaacttacctcctattgttttaaaatattataaaatgattagttataaattaacagtaatatctaatatttaaattaaagaaatcattcaaatatcgaccaatgccatcttcattattgttgaatgtaatattgttcgctacatctttaagttcttgcaaaccattttccatagcaacaccatggcgggcgtactcaatcatttcaatatcattatcttcatcaccgaatgcaataatattatttcggtcaatatttaaaaattgtctaacttgctcaatgcctcttgctttattaataccaagttttacaatttcaatgacagggaatggtgcgccccagcgtcgatgctcaatatgatcggcataaaaatgagtaagcatatttttgatttcaggtattttactttcttcggcttcaattaaaattgaggtaggggattctttcaagtggacaagtaaattaccagtttgaattcttggattacccattgaaaaaccttcaaataatcttggatcatgattgttaatgaaaacataatctttcacttctgctataatattcgatacttgatattgttgtaatccttgaataatgttttgtgcgatgcctaaatctaaaatttcatggcaagttttgaagtttttatctttagggtgatgtacgtaagcgccattaaaattaacaattggtgtcgttaaatttaattcatgataatacatttgacttgcacgataaggtctgccagtcgcaatcataatttggtgtccacgttgttgtaattcatttaatacttgtttagtatatgatgaaatttctttgttatcgtttaataatgttccgtctaagtctagacatattaaatgtggttgcatatctctctcctcataagttgcttagttcatatagatacatcatagcattttattggcgttttgtcggatatttgatatattatgaataatatgacattaaagaggtgatatggatggaagaggcattgaaagatagtatgttaggtgcattagaaatggtaattgaccctgaattaggaattgatatcgttaatttaggtttagtatacaaagtgaatgttgatgatgaaggcgtatgtacagttgatatgactttaacatcaatgggatgtccaatgggacctcaaattattgatcaagttaaaacagtattagcagagattcctgaaattcaggatactgaagtgaatatcgtatggagtccaccttggacaaaagatatgatgtcacgttacgctaagattgcacttggtgtgagctaacataaacgtgcattgcctgtagaatttcttttagaaattctctgtgttgggtccccgcagtcaatataacattgtagagtataattcattgtgaataagctcccttcaaagtagacattgaaaaatgaaaattttgaagggagccttatttatgttctaggttctgatttcattttgaaaatttatatctaacttgtttcaaaaaatatgaattaagacagtgacttgcacttccaagagtgcacaattcattttctagttgaatattttcttgaaaatttttataataaattgaatttatattacagttatattacaatacataatacttcatagtttttaagttgccgagttgcattacaaattggatttcgaagtaagaatcatcattggtaatttttttaatttaacagtattttagtcaatatgattttgatgatgtcgtaattcaataatatacatatgcatttcaatattcttttaaacagcataactaaatttaattaagcatctaagaagaacagttttaaaagggaagaatgcaaaaatgaacaaaacaaagggttttacaaagtataagaaaatgagatatatgccagggctcgatggtttgagggcaatcgctgttctaggaattattatttaccacttaaacaagcaatggttgacaggtggctttttaggtgtggatacattttttgtgatctctggttatttaattacaagcttattactcaaagagtatgatgacacaggtatcattaaattgaaaagcttttggatacgtcgtttaaaacgtttattaccagcagtcatagttttattaatggttgtagggacagcaaccttattattaaaatcagataatatcattagggttaaacatgatattattgctgcgatattttatgtatcaaactggtggtatatagcaaaagatgttaattattttgagcaattttcatttatgccattaaagcatttatggtctttagcaattgaagaacagttttacatatttttcccagttattttggttacattattgttaacaattaaaaagcgatacaaaataggatttattttttggggagtatcaataatttctttagggttaatgatgtttatctacagtattaatggggatcattcacgagtgtattttggtacagatactagattacagacattgttactgggtgttattttagcttttttatggccaccgtttaaattgaaaaatgatccacctaaagttgtaaaatatgttattgatagcataggtagtttatcatttatagtacttatattattatttttcattattaatgatgagacgaattggatatatgatggtggtttctatttaatatccatattaacgttatttattattgccagtgtcgttcatccatctacatggatagcgaagatattttcaaatccagtgttagtatttatcgggaaaaggtcttatagtttatatttatggcattttgcagtaattagtttcgtacatagttactatgtagatggacagatacctgtatatgtgtactttatagatataagtttaacaattatatttgcagagctatcatatcgctttatagaaactccatttagaaaagaaggtattaaagctttaaattggcgaccttcttatataccacaatttataagaatggcaattgtagtaaccttgttaattccatttatgttgattttagtaggtgcattcaataaatatggtaaagacattattggagaaaaagcgaatagctttgataccactattgaagataattatttaatgcggatagcaccaattgataacattcacattgatggcttagtaagtgagaagaaaaaggaatcttccgacgtatataataatattaaacctcttttaatcggtgattcagtaatggttgatatcggtgagtcatttaagtcatcagttcctaagtctagaattgatggaaaagtagggcgtcaattgtatcaaaccttacctttagttaaagcgaattattcacaatataaaaaatcatctgatcaagtcgtattagaattaggtacaaatggcgactttactgtcaaacagctcgacgatttacttaatcaatttggaaaagccaagatttatttagttaatacacgtgttccaagaatttatgaggcaaatgtaaatcgattattagctgacgcggcgaaacgaaagtccaatgtcacattaattgattggaataagcgatcacaaggacatagtgaatattttgcaccagacggtgtacatttagagtacaaaggagtcctagctttaaaagatgaaatattaaaagcacttaaaaagaaataacatatgtttaataagtctagttaatgtgtaacgtaacattagctagatttttttattcaaaaaaatatttacaaatattaggaaatttaagtgtaaaagagttgataaatgattatattgggactataatataattaaggtcaaagaaagtcaaagtcaaaagtgcaacttgaccaactctacaaattagaggtgaaattatatggatataaataaaatgacatatgctgttcaaagtgctttacaacaagcagttgaactgagtcagcaacataaattacaaaatatagaaattgaggcaattttaagcgctgccttaaatgaaagtgaaagcttatataaaagtattttagaacgagcaaatattgaggtagatcaattaaacaaagcttatgaagacaaactaaacacgtatgcatctgtagaaggtgacaatatacaatatggtcaatatattagccaacaagcaaaccaattgataactaaggctgaatcatacatgaaagaatatgaagatgaatatatttcaatggagcatattttacgttcggcaatggacattgatcaaacaacaaaacattatataaataataaagtagaagttatcaaagaaattattaaaaaagtaagagggggaaatcacgtgacatcacaaaatccagaagttaattacgaagcattagctaaatatggccgcgacttagtagaagaagttagacaaggtaaaatggatcctgttataggaagagatgaagaaattcgaaatacgattcgtattttaagtcgtaaaactaaaaacaaccctgtgctcattggtgaaccaggtgttggtaaaactgcaattgttgaaggattagcgcaacgtatagttaagaaagatgtgccagaatcattattagataaaactgtttttgagttagatttaagcgcattagtagcgggcgctaaatatcgtggtgaatttgaagagagattaaaagcagtcctaaaagaagttaaagagtctgatggtagaattatattatttattgatgaaatccatatgcttgtaggtgctggtaaaacagatggtgccatggatgcaggcaacatgctaaaaccaatgttagcacgaggagagttacattgtattggtgcaacaactttaaatgaatatcgagaatatattgaaaaagattcggcattagagcgtcgtttccaaaaagtagcagttagtgagcctgatgttgaagatacaatttcaattttacgtggtttaaaagaacgatatgaagtgtatcatggtgtgcgtattcaagatagagccttagttgctgccgctgaattgtctgatcgttacatcactgatcgttttttaccagataaagcgattgatttagttgaccaagcatgtgcaacaattcgtacggaaatgggatcaaatccaactgaattggatcaagttaatagacgtgtcatgcaattagaaattgaagaaagcgcacttaaaaatgaatctgacaatgcgagcaaacagagattacaagaactacaagaagagcttgccaatgaaaaagagaaacaagcagcacttcaatctcgtgtagaatcagaaaaagaaaaaatagcaaatttacaagaaaaacgtgcgcaactagatgaaagtagacaagcgttggaagatgcacaaacaaataacaatttagaaaaagctgctgaactacaatatggaacaattcctcaattggaaaaagaacttagagaattagaggataatttccaagatgagcaaggtgaagatacagatcgaatgattcgtgaagttgtaacagacgaagaaattggcgatattgtcagccaatggacaggcataccagtttcaaaattagttgaaacagaacgtgaaaaattacttcacttaagtgacatcttgcataaacgtgttgtaggtcaagataaagcggttgacctggtttcagatgcagtagttagagcaagagcaggtattaaagatccaaacagacctattggtagtttcttattcctaggtccaactggagtaggtaaaactgaattagctaaatcattagctgcatcattatttgattctgaaaaacatatgattcgtattgatatgagtgaatatatggaaaaacatgcagtatcaagattgataggggcacctccaggatatattggacatgatgaagggggtcaattaactgaagcggttcgtcgtaatccatactcagttatcttattagatgaggttgaaaaagcgcatactgacgtctttaatgtattattgcaaattttagatgaaggccgtttaactgattctaaaggacgtagcgttgattttaaaaatactattattattatgacaagtaatattggatctcaagttttattagaaaacgtaaaagagactggtgaaattacagaatcaacagaaaaagctgttatgacaaatttaaatgcatatttcaaaccagaaattttgaatcgtatggatgacatcgtattatttaaacctctatctattgatgacatgagtatgattgtagacaaaatattaacgcaattaaatataagattattagaacagcgaatctcaattgaagtttctgatgatgctaaagcttggctaggtcaagaagcttatgaacctcaatacggtgcaagaccattaaaacgttttgtacaacgccaaattgaaacaccattagcacgtatgatgattaaagagggattcccagaaggtacaacgattaaagttaatttaaattcagacaataacttaacgtttaatgttgaaaaaattcatgaataaaattgaaccaagaatgtgatgattaatcgcattcttggttttttagatttgaaatttattataattgttcattggcaatatactttttaaatgatttaataaaaaccaatatttctgggctttcttttttgctgtatatatatgtaaatgaaataggcgcttgtaaaattttcgtgttaataaccgaaatattgtaatcactatctgttgttatataaataggcaggaatgatataccttgattcatttcgattaatttaattgaagtatgcacatcattgatagatagaaattgtgcttttccataaatatttaaaatattatttttaagtgatgaccaatattctggatggttatcacttattattttgtatttttcaaataaagatgcctcagttagaagatgattattctctttattgggagcaatcaatacaattttaccttcgcatactttttcagaatgaacttctcttagtttaggttgatttctgctaatcccgatgtcatacgtatgattattaatatctttttcaatattttcatttttgacatggagagaaacatcgataaacggatgctcgttaaagaaagattttaaaaatttgggcataatgaatgtcgcgatatatgaagacacgacaacatttaatttcgattgaaacatcgtttttttaagttggatatgtttgatgccactttcatattgttcaataaaactttgcgcaattggaagaaatgtatgaccatcttcagtcaagataatttgatttttataagtttcaaatagtttcacattgagatgctgttctaaatttttaatttgcttatgtatagaaggtatagtgagattaatttcttcactagctaatcgatagtttaacgtcttcgctaaaatgacaaatgtatagtaccaatccaaattcatgaacttacctctttcaaaaaagttaataattcattagataatatttaatttttattgcataaaaataatattaatattatatcagaggttatcgagggggtgaagtaatatgattcgaattcaagataatacaataagggatggtatgcaacaaagtaatgttcgaaaaagtctaattataaaaaaagaagtattgaaacaaattaacaagttaaatataaattctgttgaagtaggcatgtgtacaactatcgaggatgaatttaatattcatcaattcagagacattttaagtcctgaaaaagaattagtagtattgactaggcttaatgaaaaagaaataaaaaaaatagtcaaattgaaaattcataatttagtggtaaaaatactattgccaatatctgacttgcatataaaagaaaagcttaatttttcaaataaatattatattcagaaaatcaaagactgcttggatatattaaagaaagataaaaaaggagtagatatttgttttgaagatgcaacaaggacttctagagaaaaattgaaagaatacatggaaattatttcaaaatatcaagttagaacagttacatttgcggacactgtaggatgttcgacaccattagaatacggagatatttttaattactttgtaaaaaaatattctaacataattttttctgctcattgtcataacgatctagggttggctactgcaaatacattagctgcaattttaaatggtgcaaagcaaatagaaactacatttttgggaattggtgagagagcgggtaatgctcctattgaggaaataattactattttgacaaaaaaacaaatagaaagtacggaattcactttacccgacgtatataaaactagtattaatatttctaaaattctcgattttcaaatatcagaaaacaaacctataattggtgaaaatatatttaaacatgaatcaggaattcatcaagatggtactaaaaaaaatataaatatgtatcaatatttagttcctagtgatttaggattgaaaaattcacaagttgttcagtttccaataagtaatatttctagtaagaaaatcttgcacaataaatttaaatcaatagttaacactgaagaaattgatgaaaatatttctttctataaacttgtgaacaagttttcacctgaagtagcacctgaagatacagtggatttacttcagataataaaaaggaggagtaaagatggaaattttaaatgattctgtaaaaagttttgaaaaactttatttacaattacaagatggttttccagtgattgttcctactgatactaattataatttatgtagtttaccaaacaatgatctttgtatcgataaaatatttgaatataaaaagagatcgaaagataagccattatcattatttattgataagccagaggattggaaattgtatggagataatcaaaatacggaaatagttgataaactagttgaaatattttggcctggaccattaaatattattttaaaaaataaaacaagctataattatatgctcaataattcagatagtatagctataggatgtgtgcaaaataaaacgatgagaaggtttatttcatatattaattcacctatagcaattacttcagcaaatatctctggaactgccgatgatattttaataactgaaaatgaagcaattaagcacatgggcgaaaatgtaagatatatgctaagaagtcaaaataaaactaactataaaacatctagtacgattattaaagtgacagataataaaattgaattattaagagaaggagatataaagtttgaagaaataaaagaaagactaggtacaggtattatttatgaataagttaatacttgggatttatttgtaccgaattttttcacgagcatacttttatttaccgtttttattaatttactttttgattcaaggttattccataatacaattagaaatattaatggcgtcttatggcattgcagcatttttattctctctatacaaagagaagtgttttaaaatttgtaacttaaaagattctaataaattagttgttagtgaaatattcaaaatcatcggtttattgttgttattatatcaaaatcaatatttaattttagtagtggcacaaatattattagggttaagttactcaatgatggcgggtgttgataccgcaataattaaaagaaatataacaaatgagaaatacgtacaaaataagtcaaatagctatatgttcctatcattattaatttcagggattataggtagttatctttatggaataaatattaaatggcctataataatgactggtatattttcaattctaacaattataattattcgatgcacattagttgaaaatagggaattaaatttaataggagaaacaaagggaaagataaagaaatttctaccggaagagaagttttggatattgcattattcttttttaagagcgttaatattaggattttttataggatttattccaattaatatatataatgatttaaaactgaataatttacaatttatttcagtattaacttgttacacagttatgggttatttatcttcacgttatttaactaaatacttgaactataagtttgtgtcagaaatttgtttaataatatttttaataatatatacatatcaaagtttcatagcagttactatttctatgatatttttaggtatttcttcagggttaactcgtccacaaactataaataaactttctagcagtagtaacttaagagtgatgcttaattatgcagaaacgttatattttatttttaatatcgcatttttacttattggtggttatctatattcaattggaactattcaatatttaatgttatttatgtcattattgacgtttatatatttactaacattattttatttaaggagagatcaacatgaaaatcaacacagaatttaaaggaaataatataccatatgaatatgcggcaggcgcagatataagtgatttaataaatggcaatccaattaaatcattcccgtttgaaataacagaacttccaaaagatactaaatatcttgcatggtctctgatagattatgatgcaataccagtttgcggatttgcatggattcattggagcgttgctaatgtaagtatcactggtgattcaatttctataaaagcagatttatcaagaacaaagggtgactatgtacaaggtaaaaatagctttactagtgggttgttggctgaagatttttcagaaatagaaaatcactatgtaggaccaacaccacctgataaagatcatcaatatgaattaacagtttatgcgttagatcattctttaaatttgaagaatgggttctacttgaatgaatttttaaaagaagtaaatcaacataaaattgatcaaacaagtattaaccttataggaagaaaaatttaatgctaaatatctcatcaatataaaattgttcaattaaaagtacaaagaaacaagagatttaatttatatattaggtacggcgttcgctataatgcaaagaagtaattaaatttaagaaatgtaaacttagttattgtaatgtgaatttatttgaaaaaatagaaagtattaacaattatagcttttacattaattaaaatttatttttaaaaacaagtaaacaatttacatacttataatttttgaaacttttagatttgtgttatattgattttgtaagatactttaactcacaaaggagagagattatatgaaattaaaatcatttataactgtaactttggcactgggcatgatcgcaacgactggcgctactgtgacaagtaatgaggtatctgcagcagaaaaggacaaactaccggcaactcaaaaagctaaagaaatgcaaaatgttccatatacaattgcagtagatggcattatggctttcaatcaatcttacttaaatttaccaaaagatagccaattatcatatttagatttaggaaataaagttaaagctttattatatgatgaacgtggtgtaacacctgagaagattcgaaatgcaaaatctgccgtttacacgattacttggaaagatggtagtaaaaaagaagtggatcttaagaaagatagctacacagcaaacttgtttgattcaaattcaattaaacaaattgatattaatgtaaaaactaaataaacacttaaaattatcaaattcaacatgaagcatttaattttacagtgatgattataatataattgccttgatacaaagattactcgtaaatgacatctttgtattaaggctttttctaaatttaaaagtgatgggttagaggttattgagctttaaaatattcaaaatacaaaacattaatggccaaaaataaaagccgcctttatctgggcagcttcaataataagaaagacatatttcattttatactaaatagttattgtgatgaatctttcggcggtttaattactgcagcaaaaattgctgtgaaaatcgtgaacaatactgccatgataattggattcactacatttaagctgtctccacctactaggctattaagtacaaagttaaccatttgcattaataataatgcccaaaagaatgttacgaggtgtttcatgtcattctacctccactttaattatatatattttattttaagtgaaagttagaaatttgtatagtaacatctcatatattttgaccatattatacagtttaaataaatgattttatctgaatggctattcaaatttaagcgcattaaaaccaatttcatactgaaatttgacgataataaagcattaaaattttattaactagtcaatattcctacctctgacttgagtttaaaaagtaatctatgttaaattaatacctggtattaaaaattttattaagaaggtgttcaactatgaacgtgggtattaaaggttttggtgcatatgcaccagaaaagattattgacaatgcctattttgagcaatttttagatacatctgatgaatggatttctaagatgactggaattaaagaaagacattgggcagatgacgatcaagatacttcagatttagcatatgaagcaagtgtaaaagcaatcgctgacgctggtattcagcctgaagatatagatatgataattgttgccacagcaactggagatatgccatttccaactgtcgcaaatatgttgcaagaacgtttagggacgggcaaagttgcctctatggatcaacttgcagcatgttctggatttatgtattcaatgattacagctaaacaatatgttcaatctggagattatcataatattttagttgtcggtgcagataaattatctaaaataacagatttaactgaccgttctactgcagttctatttggagatggtgcaggtgcggttatcatcggtgaagtttcagaaggcagaggtattataagttatgaaatgggttctgatggcactggtggtaaacatttatatttagataaagatactggtaaactgaaaatgaatggtcgagaagtatttaaatttgctgttagaattatgggtgatgcatcaacacgtgtagttgaaaaagcgaatttaacatcagatgatatagatttatttattcctcatcaagctaatattagaattatggaatcagctagagaacgcttaggtatttcaaaagacaaaatgagtgtttctgtaaataaatatggaaatacttcagctgcgtcaatacctttaagtatcgatcaagaattaaaaaatggtaaactcaaagatgatgatacaattgttcttgtcggattcggtggcggcctaacttggggcgcaatgacaataaaatggggaaaataggaggataacgaatgagtcaaaataaaagagtagttattacaggtatgggagccctttctccaatcggtaatgatgtcaaaacaacatgggagaatgctctaaaaggcgtaaatggtatcgataaaattacacgtatcgatactgaaccttatagcgttcacttagcaggagaacttaaaaactttaatattgaagatcatatcgacaaaaaagaagcgcgtcgtatggatagatttactcaatatgcaattgtagcagctagagaggctgttaaagatgcgcaattagatatcaatgataatactgcagatcgaatcggtgtatggattggttctggtatcggtggtatggaaacatttgaaattgcacataaacaattaatggataaaggcccaagacgtgtgagtccatttttcgtaccaatgttaattcctgatatggcaactgggcaagtatcaattgacttaggtgcaaaaggaccaaatggtgcaacagttacagcatgtgcaacaggtacaaactcaatcggagaagcatttaaaattgtgcaacgcggtgatgcagatgcaatgattactggtggtacggaagctccaatcactcatatggcaattgcaggtttcagtgcaagtcgagcgctttctacaaatgatgacattgaaacagcatgtcgtccattccaagaaggtagagacggttttgttatgggtgaaggtgctggtattttagtaatcgaatctttagaatcagcacaagctcgaggtgccaatatttatgctgagatagttggctatggtactacaggtgatgcttatcatattacagcgccagctccagaaggtgaaggcggttctagagcaatgcaagcagctatggatgatgctggtattgaacctaaagatgtacaatacttaaatgcccatggtacaagtactcctgttggtgacttaaatgaagttaaagctattaaaaatacatttggtgaagcagctaaacacttaaaagttagctcaacaaaatcaatgactggtcacttacttggtgcaacaggtggaattgaagcaatcttctcagcgctttcaattaaagactctaaagtcgcaccgacaatacatgcggtaacaccagacccagaatgtgatttggatattgttccaaatgaagcgcaagaccttgatattacttatgcaatgagtaatagcttaggattcggtggacataacgcagtattagtattcaagaaatttgaagcataattataaaaatcttcagtaacgttgttttagttactgaagattttttctgtttctttatactaagatgagcgacagcacaatcgtcataataaaatatagaatatttattaataataaggggattatccatgtagaaacaaagtaatgctctttttttacctcttgtgggttgaaaaatggatcatcagagatagacttcttctttttcgaagatgacatttgatactttaatcttctaaaaccataacttgtcgcatcaaaaatgccttcttgtacaagtaaaatcaaaaatatgctaataaaaataattaatgaaacataaaacaatatatttaaatatgtaatgatagtatggctattaaaaacccatataataaacgttaatattggcgttattagtgccattccaagccattttttcaacatttgatcactcccacttatagaaaactcttacgcatagtttacattaaaatgagacattgaggaatgattttttaatttctgcagctttattgaaattctaaaatcaatcattcttcattagtttaaagcaaaaaaatattgatatatagtaaatattgtatatataatattagttaagatttcagaaaattttgaagggaatggaaatttagaaatcggaatttgttagaggaggggattagatggggaaatatattttcaaacgatttatttatatgcttatttctttatttattattattacaattacatttttcttaatgaaattaatgccaggttcgccatttaacgatgctaaattaaatgctgaacaaaaagaaattttaaatgaaaaatatggattaaatgatcctgtagctacgcagtatttacattatttaaaaaatgttgttacaggcgattttggtaattcattccagtatcataatcaacctgtgtgggatttgattaaaccgagactactaccttcttttgaaatgggtcttacagcaatgttcatcggtgtgatactgggacttattttaggtgttgcagcagctactaaacaaaattcttgggttgactatacaactacagttatttcagttattgctgtatctgtaccatcttttgtacttgctgtacttttacaatatgtatttgcagttaaattaagatggttcccagtagctggatgggaaggtttttcgaccgcggtattaccgtcacttgcattatctgcagctgttttagcaactgtcgccagatacataagagcagagatgatagaggtattaagttcagactatattttattagcgagagctaaaggtaattcgacaatgcgtgtactttttggacatgcacttagaaatgctttaattccaattattacaattatcgttcccatgttagcaagtattttaacaggcactttaacaattgaaaatatttttggggttcctggattaggggatcaattcgtacgttcaattacaacaaatgatttctcagtaatcatggcaatcacactattatttagcacactgtttatcgtttctatttttattgtagatattttgtacggtgtgatagatccacgaattcgtgttcaaggaggtaaaaaataatggctgaaaataaaaacaatttgtcgattaacgacgatcattctaatgcagctatgacgcatacctctgacgctatcgcatcatctgattttattattagagaattagacttgaatcaggaacctgaaatgcaacgagaaagcaaaaacttttggcaagatgcttgggctcagttaaaacgaaataagttagctgttgtcggtatgataggtttaattatcattgtaatatttgcttttatcggtccagttataaataaacatgattatgctgaacaaaatgtagaacatagaaatcttccggcaaaaatacctgtattagacaaagttccatttttaccttttgatggtaaagatgcagatggcaaggatgcttataaagcagcaaatgctaaagaaaattattggtttggtactgatcagttgggtcgagatttatggacaagaacatggaaaggtgctcaaatttcattgtttatcggtgttgttgcagcgatgttagatatttttattggcgttgtatatggtgcgatttctggattcttcggtggacgtgtcgatacgattatgcaacgtatacttgaagtcatagcatctattccgaatttaattgtcgtaattttatttgtattaatttttgaaccatccatttggacaattatattggctatgtctatcacaggctggttaggcatgagcagagttgtacgtggagaatttttaaaattgaaaaatcaagagtttgtcatggcttcgaaaacattgggggcttcaaaattcaaattgatatttaagcatattttacctaatacgttaggtgctatcgtggttacatcaatgtttacagtacctagtgctattttcttcgaagcatttttaagtttcattggtataggtgtacctgcacctcaaacatcgttagggtcattagtaaatgatgggcgcgcaatgttattaatttatccacatgaattatttataccagcaatgattttaagtttattaattctattcttttacttatttagtgatggattacgtgatgcatttgatccgaaaatgcgtaaataaaagggggcatagcatatgactgaaagaatattagaagtaaatgatttgcatgtttcctttgatattacagcaggggaagtgcaggcagtgagaggtgtagatttttatttaaacaagggggaaacattggcaattgttggtgaatcaggttcaggtaaatctgtaacaacaaaagcaattacaaaattattccaaggggacacaggaagaattaaaaagggagaaattttatttttaggggaagatttagcaaaaaaacctgaaaatgagttaattaaattacgtggcaaagatatttcaatgatctttcaagatccaatgacatctttaaacccaacgatgcaaattggtaaacaagtcatggaaccattaattaagcacaaaaattatagtaaagcacaagctaaaaagcgcgcattggaaatactaaatcttgtaggtttaccaaatgcagaaaaaagatttaaagcatatcctcatcaattttcaggtggacaaaggcaaagaattgttattgcaaccgcattagcttgtgaacctaaagtgctcattgctgatgaaccaacgactgcattagacgtaacgatgcaggcacaaattttagatttaatgaaagaactacaacaaaaaatcgatacagcaattatttttataacgcatgatttaggggttgttgcgaatattgctgatagagtggcagttatgtatggtggtcaaatggttgaaacaggagatgttaacgaaatattttatgatccaaagcatccatatacatggggattattatcgtcaatgcctgatttatcaacaacaaatgacacaccattactagcgattcctggagcgccacctgatttattacacccacctaaaggtgatgcatttgcgagacgtagtcaatatgcattagatattgattttaaagtagaaccaccgtggtttaaagtttcaccgacacattttgtgaaatcttggttattagacgcacgtgcaccaaaagttgaactacccgagctggtaaaacaacgtatgaaaccgatgcctaataattatgaaaaaccactcaaggtagaaagggtgtcgttcaatgaaaaatgatgaagtgctattatctattaaaaatttaaagcaatattttaacgcaggaaagaaaaacgaagtgagagcgattgaaaatatttcgtttgatatatacaaaggggaaacattaggtttagtaggagaatcggggtgtggtaaatctacaactggtaaatcaattattaaacttaatgatattacaagtggagaaattttgtatgagggtattgatatacaaaagattcgtaaacgtaaagatttgcttaaatttaataaaaagatacagatgatttttcaagacccatatgcgtctttaaatcctaggttaaaagtaatggatatagtagctgaaggtattgatatccatcatttagcaactgataagcgtgaccgaaaaaaacgtgtctatgatttacttgaaactgttggattaagtaaagaacatgccaatcgctatcctcatgaattttcaggtggacaacgccaacgtattggaattgcccgtgcattagccgttgaaccagaattcattatcgcggacgaaccaatatcggcattggatgtttcaatccaagctcaagtagttaatttattattaaaattacaacgtgaaagagggattacgttcctatttatagctcatgatctatcaatggtgaagtatatttcagatcgtattgcagtcatgcattttgggaaaatagttgaaattggaccggcagaagaaatttatcaaaatccattacacgattatactaagtctttattatcagccattccacaacctgatcctgaatcagaacgcagtcgcaaacgatttagttatattgatgatgaagcaaataatcatttaagacaattacatgaaattagaccgaatcactttgtctttagtactgaagaagaagcggcacaactacgagaaaataaattggtgacacaaaattaaggggaagggggaaatgcaatgacgagaaaatttagaacacttattttaattttgattgctacaattgcattaagtggttgtgctaatgacgatggtatttattcagataaaggtcaagtattcagaaaaattttgtcatcagacttaacatcccttgatacatcattaataacggatgaaatatcttctgaagtgactgcgcaaacattcgaaggtttatacacattaggaaaaggtgacaaaccggtgttaggtgttgcgaaagcttttcctgaaaagagtaaagatggtaaaactttaaaggttaaattaagaagcgatgctaaatggagcaatggtgacaaagtgactgcacaagactttgtttatgcttggagaaaaacagttgaccctaaaacaggttctgaatttgcatacattatgggggacattaaaaatgcgagtgatattagtactggtaagaaacctgtagagcaattaggtatcaaagcattaaatgatgaaacattacaaattgaattagaaaagccggttccatatattaatcaattattagcacttaatacctttgcacctcaaaatgaaaaagttgccaaaaaatatggtaaaaattacggtacggcagctgatagagcggtatacaatggtccatttaaagttgatgattggaaacaagaagataaaaccttactatctaaaaatcagtattattgggataaaaagaatgtaaaattagataaagtgaattataaagttattaaagacttacaagccggtgcatcattgtatgatactgaatcagtagatgacgcagttattactgcagatcaagtaaataaatataaagacaacaaaggattaaactttgtgttaacgtctgggacattttttgtaaaaatgaatgaaaaacaatatcctgattttaaaaacaaaaatttaagattggctatcgcacaagcaatagataaaaaaggatacgttgattcagtgaaaaacaatggctcaattccttccgatacactaacagccaaaggaattgcgaaagcgcctaatggcaaagattatgcgagtaccatgaattcgcctttaaaatataatcctaaagaagcaagagcacactgggacaaagctaaaaaagagttaggtaaaaatgaagtgacattttcaatgaacacagaagatacaccagatgcaaaaatatctgctgaatatatcaaatcgcaagttgagaaaaatttaccaggagttactttgaaaattaagcaattaccgtttaaacaaagagtatcactagaactgagtaacaattttgaagcatcacttagtggttggtctgcagattaccctgatcctatggcttatttagaaacaatgaccacaggtagcgcacaaaataatacagactggggtaataaagaatatgatcaattacttaaagtagcaagaaccaaattggcacttcaaccgaacgaacgatatgaaaacttgaaaaaagcagaagaaatgttcctaggagatgcaccggtagcaccaatttatcaaaaaggtgttgcacatttaacaaatcctcaagtaaaaggattaatttaccataaatttggtccaaataactcacttaaacatgtatatattgataaatcgatagataaagaaacaggtaagaagaaaaaataatatgctttgtaaattaggctggagacatatctccagtctttttgtgttggataaaaactttgggaataaaaatttaaaataagtcgttttttaaattactgaaattgattaaatgcataaataactgaatattctaaaaataaacttgtaataattttttctatgagtaaactaaaaagaaaaaattagattgaaagtaggaggcatatgtatggggaagctaattaaatatatttcaatacttcttattgtcgttttagtgttgagtgcttgcggaaaaagcagtaataaagatgaaggagtaaaagatgctactaaaacggaaacctcaaaacataaaggtggtaccttaaatgtagcattaacagcaccgccaagtggtgtttattcttcgttattaaatagtacacatgcagattctgtagttgagggatattttaacgaaagcttattagcaactgataaaaaaatacgtcctaaggcatatattgcttcatggaaggacatcgagccggctaagaaaatagaatttaaaattaaaaaaggtattaaatggcatgatggtaatgaattgaaaattgatgattggatttattcaattgaagtcttagctaacaaggactacgaaggtgcttattatccaagtgtagaaaatatccaaggtgcgaaagattatcatgaaggaaaaactgatcatattagcggattgaagaaaatagatgactacactatgcaggttacatttgataaaaaacaagaaaattacttaacaggatttattactggacatttattaagtaaaaaatatttatcagatgtaccaattaaagatttagcgaaatcagataaaatccgaaaatatcctattggtattggaccgtataaagttaagaaaatcgttccaggtgaggctgttcaactcgttaaatttgatgattattggcaaggtaagcctgcactagacaaaatcaatttaaaagttattgatcaagctcaaattattaaggcaatggaaaaaggcgatattgatgttgcgaatgatgctaccggtgcaatggcaaaagatgctaagtcatctaatgctggtctcaaggtattatctgcgccaagcttagactacggtttaataggattcgtatctcatgattacgataaaaaagctaataaaactggtaaagtgagaccaaaatatgaagacaaagaattacgtaaagcaatgctttatgcaattgatagagaaaaatggattaaagcgtttttcaatggttacgctagtgaaatcaatagttttgtaccatctatgcattggatagcagccaatcctaaggacctaaatgattacaaatatgatcctgaaaaagctaaaaaaatcttagataagttaggttataaagatagagatggtgacggatttagagaagatcctaaaggtaataaatttgagattaactttaaacattattcaggttcaaatcctacttttgaaccaagaactgctgcgataaaagatttctgggaaaaagttggcttgaaaacaaatgtgaagttagtagaattcggtaaatataatgaagacttagcaaatgcatctaaagatatggaagtgtacttcagatcatgggcaggaggtacagatccagatccatcagatttataccacactgatagacctcaaaatgaaatgagaacagttttaccaaaatcagatcaatatttagatgatgcattagacttcgaaaaagtaggcattgatgaaaagaaacgtaaagatatttatgttaaatggcaaaaatatatgaatgatgagttacctggattaccaatgttccaaggtaaatcgataactattgttaacgataaagtacgaaacttagacattgaaattggaactgatcaaagtttatataatttaactaaagaagcttagtaatgtaacctcgacgattttgtcgaggtttacttatatggggggatgttatgaataatgtattgttagaggttaaagatttagaaacatcattaaaaataaataatgaatggttagcaactgttgaaaatatttcttttgaattatctaaaggagaagttttgggtatagtaggggaatctggttgcggtaagtccatattaagtaagtcaattattaaattattaccagaaaagatatctaaactaagtagtggagaagttatatttgatggtaaacgaatcgatacgctcaatgagaagcaattgctagatattcgaggaaatgatattgctatgatttttcaagaacctatgactgctttaaatcctgtatttaccataaaaaatcaacttgtggaatctataaaatcacataaaaaaatttctaaaaaagaagcaaataacttagcaaaagatttactaaaaaaagttggaattgctagacaagatgaaatattaaatagctatcctcatcaattatctggtggtatgagacaaagagtaatgattgcaatggccatttcatgttctcctaaattattaattgctgatgaacctacaacagcattggatgtcacgattcaagcgcaaatattagacttattaaaagaattgcaaaaggaaacgcaaatggcaattatgatgattacacatgatttgagtgtagttgctgagttttgcgataaagtcttagttatgtatgcaggtcaaattgtagaatttggaggcataaaagaaatactacacaatccgaaacatccttatacccaaaaattattatcaacaattccaaaacttaaagaagggcagaaacgacttgaaacgatagaaggaattgtgccatcaatccaagcatttcacgttaataagtgcagatttgcaaatagatgtaacaaaaaactggatatttgtaataatcaatctcctaaaatgcatgtttgtgaagacgtcattgtacgttgtcatttgtacaaaaatgaatataaggagatataagaatggaaaatattttagaagtcaaccaaataaaaaaatactacaaaattaaaactggattattacaaaaaactcagtacgttaaagctgttgatgacgtatcgttttcaataaaaaaaggacaaacttttggattagtaggagaatcgggttgtggtaagtcaacgttaggtaaagtgattatcaggcttgaagatgcaacttcaggttcaataattgttaatggtgaagatataacaagattacaaggtaaaaaactcagaaaatcacgacaacaatatcagatgatatttcaagatccgtatgcatcattgaatccgatgcaaatggttggagatatcatttcagaacctattttaaattataaaaaattgccaaaagaagaaataaaaaaagaagtactatatttattaaaatgtgttggcctaagtgaagatgcatattataaatatgcacatgaattttcaggtggacagagacaaagagtgggaattgcaagagcattggctttgcgtccgagtttaattgttgctgatgagcctgtaagtgcattagatgtatctgttcaatctcaagtactgaatttattaaaagatttacaagagcaatttaagttaagctatttatttatcgcgcatgatttaagtgtagtgaaacatattagtgatgtaattggagttatgtatttaggtcatatagttgaaattgcatctgataaagaaatttatgaaaatcccaaacatccatatacaaaagcattaatttcatcaataccacaaattgataaacataataacaatagaattatattaaaaggagaattaccttcgccaagtaatccgccgcaaggttgtccttttcatacaagatgtccgattgcaaaagataaatgtaaagaaaatataccacaattaaaggacattggtaacgaacatcaagttgcttgtttctacgtagataaagtaggtgatttaaatgcttaaattaatacttaaaaggttagggttaatgatcccgttactaattttaatctcaatagttgtattttcattagcaatcatacaaccaggagatccattttcagatttacaaaacggtaaaataaaacaagaagcaataaatgcacaaagggaaaagttaggcctcaacgactcaataccacatcaatatattagatgggtcaatcatgttatacatggtgatttaggggagtcaatcaaatataagaggccggtaattgatgttattgaggaaagaattccaaatacaatattactcggtgctatgtcattaattattacttatattatctcatttgctttaggaataacgtcaggtagatattcttacagtttgactgattatactgtgcaaatatttaattatttgatgttagctattccatcttttattgcgggagtatttgcaatttttattttttcttttgaattacaatggtttccgtttcaaggttctgttgatattaaccttaaagaaggtacttttgaatattatatgagtaaaatttatcatacatttttgcctgcattaactttaggattattatctactgctggttatattcaatatttacgtaatgatattattgaaaattctaaaaaagattatgtattgacggcaaggtcaaaaggattatctatgaataaaatttataataaacatatattgagaaattctttaatacctattattacatttttaggtgctgatattgtaagtattttaggtggagctgtgattactgagactatcttttcatataacggtatcggtaaattatttttagaatcggtaataggtcaagactatccattaatgatggcattaacgttatttttctcatttttaggtttattgggtaatttgatttctgatattacttatggatttatagatccaagaattagaagtaactaggggggattggaatgcaaaataagtcaaaatcgccttttaaaattgcattgtctagatttattcataataaaattgcaatgttatcgattatttttttattaatcataactattgtatcaattatagcgccattaatagctccttttccagtgaaccaacaagatttattaaatataaaaggtgaaatgacagcacaaaacattcttggtacagactctggtggtagggataactttagtcgtttgttatatgcaggtcgtatttcattatccattggaattacatctacaataggaatgcttttgattggaattacagttggagtgatttctggttattttggaggtattgttgatacattattaatgagaataaccgaatttgttatgttatttccatttttaatatttgcaattgtattaaatgctgcacttggagataaaattaaaaatccttatggatctgccataattcttgttctagttattatcgtattaagttggggaggtattgcaagacttgttcgtggtaaagtacttcaagaaaaagaaaatgaatactttttggcagcaaaatcaattggtacacccacatataaaattattttgaaacatcttttgccgaatatattaagtgtagttatcgtacaagcaacattgttatttgccggtatgattgtagtggaatcaggattgagctttttaggattcggaattagtaaagcaataccatcttggggtaatatgttgagtgatgctcaagaaggggatgttataagtggtaaaccgtggatatggatgccacctgctataatgattacattaactatattaagtataaactttgtaggggaagggcttaaagatgcttttaatcctagaggtagacgttaaataataaaagaggcactagttaattctagtacctctttattttatctcttacgtcctaatcccatcgctttttccatttttttgacagttttaaatgaaactttgtgtgctttatctctaccttgatctaaaatatcatcaagtttatctgagttatagaaactttcgtatttttcttggaattctactaaaaatgctttaactatttcagcaaggtcacctttaaatttaccataaccttccccttcatattttgcctcaatatctttaattggcatgtcggttaatccagcgtatattgaaattaaatttgttatacctggcttgttgtcacgatcaaatttaataataccatctgaatcagttactgcgcttttaatttttttagctgcaacattcggctcgtccaataatgaaatgaagtttttagcattatcatcactcttactcatttttcttgttgggtcttgtaaactcatgacacgtccaccaactttaggcatacgaatttcaggtttcacaagcacatcattatagcgactattaaatctatctacaaggttacgagtcaattcgatatgctgcttttggtcatctccaactggaacgatattagtattgtaaagaacaatatcagctgccattaaaggtggatatgttaatagaccagctggtataccttcaactgctttctgagctttatctttgtattgcgtcatacgctctaattctccaacagaagcaatcgtagttaacatccatcctgcttgtacgtgtgcagggacttcagattgtatgaacaatgttgctttgtctggatctataccagaagctaaataaatcgctgctaattgtctggtctgtttacgtaattttaaacgatcttgtggcattgtaattgcatgttgatctacgatacagaaataacaatcatagtcattttgcacatcaacaaattgttttagtgcgccaatataatttccaatagtaggaattccactaggttggatgcctgaaaataatgtctccatttaaatgcctactttcttagtaatattttaataattatcattataacagtatttcttaaaaatgtaagatgtgttagaatatacgtataacttactactaacaaaggattaataatcttttttataagtgtagaaacttatctgaaaaattaggtttttctcatttaattttaatgttagatagttataataaatagtaacgattaagaattttagaaaaaaatgttttttcttgatctataactaaattttaagcaatgaattttattcattcaaataggagagtgagatgtatggtaacattatttacttcaccaagttgcacatcttgccgtaaagcgaaagcatggttacaagaacatgacattccgtatacggagcgtaatattttttctgaacatttaacaattgatgaaattaagcaaatattaaaaatgactgaagacggtactgatgaaatcatttctacacgttctaaaacataccaaaaattaaatgttgatattgattcactaccattacaagacttatattcaatcattcaagataatcctggcttattacgtcgtccaattattttagataataaacgactacaagttggttataatgaggacgagattcgacgtttcttacctagaaaagttcgtacgttccaattacaagaagcacaacgtatggttgactaataaccatttaactatgtgtcatactttactaaaagatatgtcaagcaacactatttctatagtgttgcttttttggttttaattttacaataattgcttagtatcttttaaatcaaatgtgcaattgttaatatagctctatattagagtgttttggatgaaacatttgctatgataaggtaaaattaaattaagaaagtgctttaatgctttaactgtataaatcatttaaatagttttgctacaacgaatatgttattataagttaccaaaatattttagagaaagaaatcaaacaaataaattgtattttgtttgatgctttaatacaatgtggatactattcatcgactgtaaggagtgagatgatatgagaatagaacgagtagatgatacaactgtaaaattgtttataacatatagcgatatcgaggcccgtggatttagtcgtgaagatttatggacaaatcgcaaacgtggcgaagaattcttttggtcaatgatggatgaaattaacgaagaagaagattttgttgtagaaggtccattatggattcaagtacatgcctttgaaaaaggtgtcgaagtcacaatttctaaatctaaaaatgaagatatgatgaatatgtctgatgatgatgcaactgatcaatttgatgaacaagttcaagaattgttagctcaaacattagaaggtgaagatcaattagaagaattattcgagcaacgaacaaaagaaaaagaagctcaaggttctaaacgtcaaaagtcttcagcacgtaaaaatacaagaacaatcattgtgaaatttaacgatttagaagatgttattaattatgcatatcatagcaatccaataactacagagtttgaagatttgttatatatggttgatggtacttattattatgctgtacattttgatagtcatgttgatcaagaagtcattaatgatagttacagtcaattgcttgaatttgcatatccaacagacagaacagaagtttatttaaatgactatgctaaaataattatgagtcataacgtaacagctcaagttcgacgttattttccagagacaactgaataacgatattaattaagcaacgcactatgaaaggagactctttggagtctctttttttattgatttcaaaagctgaaaaagtaatagtagttaaacttacgtgtaatattttgaggtgaagatatgttagtagctttaaatgaagaaaaggaacgtgtgttagcaactactgcattgagaaagacacaatatttttgtcctgtgtgtggcaagcaagttattttaaagcgtgggctcaaagtaattagtcattttgcacataaacatttagcggaacaaaaatgttttaataatgaaacgattaaacattataaaagtaaattgattttagcacagatgatacagcaacaaggatgtaaagtagagatagagccatttttaaaagaaataaaacaaattccggatattttgattaataataaatatgttattgagctacagtattcgccaattccttataaacagattcttcaacgaacggaaggtttaaagaaaatgggatataaagtaagttggttattaaatgatgttgattattgtcataataaagtgaagttcaatcattttcatagtttgtttattaatccaatcactcgaaaacttcatacgttcaatttagagaaaaaacaaataatgatgtttcaacaaatacaatatttaggcgggcacaaatatgtcgctgaaaaaaggaatgccaaaattattgagttgtttaatgaggcgccttgtgattatcatgctgtttataaattatcaaagttcgcaattaatcaatatatcaaatattgtcgctggcaaaattctgttttagaacccactttaagtgcaatgtatcaattacagttaactgatcaagaagtagtgtacaattatggttatatttttccagagcaaatttatattgaaaatcatccaattgagtggcaattacaagttgatttatggttaaagaatggaaaaagcaaattagtaaatgacaatcttaattattttaaactgaaaaaatttattgttgctctagaaagtaaaacagcaattatagaaaaacttattaacaattatttaaatatttgttcagatagaggtaatgacgtgcaaattttgttctaaaatgagaaaattatatcaattatattttattaggaggtttactacatatgagtcaacaattatcgagagaagaacaggaacgtaaatatcctgaatatacatgggacttaacaacaattttcaaagatgatgaagcttttgaggctgcatttaaagaagttgaaaatgagttaggcaaagaagaacaatttaaaggacacattggtgatagtgctgagacattatacaatgcgttagaattagaagatacattaggtactaaattagaaaaagtatatgtatacgcgcacctaaaacaagaccaagacacaacgaacgacaagtatactggtatggagtcaagagcacatcaattaattattaaatttagctcggcatggagtttcttagtgccagagattttacaaattgatgaagataaaattcaatcatttgtaaattcatatgataaattacaaaaattcgcatttgatttgaagttgattaatgaaaaacgtcctcatattttagatgctgaaactgaaaagttattaacagaagcgcaggacgcgttatcaacgccatcaaatgtatacggtatgtttagcaacgctgatttagtatttgaagatgcgattgataaagatggaaatgcacacccgttaacacaaggtacatttattaagtatttagaatcagatgatcgcaaactaagagaaagtgcttttagaaatgtatataaagcatatggtgctcataataatacgcttggcgctacgctagcaggtgaagtgaagaaaaatgtatttaatgctcgtacacacaattacaaaactgcaagagaaaaagcattaagtaataatcatattccagaaaatgtatatgacaatctagtaaaaactgtacataaatatttaccattgctacatagatatactgaattgcgcaaagaattgctaggtttagatgacttgaaaatgtatgatttatatacaccattaattaaagatattaagtttgaaatgccttatgaagaagctaaagagtggatgttaaaagctttagaaccaatgggtgaagaatatttaaatgtagttaaagaaggcttaaacaatcgttgggtcgatgtctatgagaataaaggtaaacgttcaggtggctattcatcaggtgcacatttaactaatccatttattctacttaactggtctaatactatttcagacttatacacattagttcatgaatttgggcattcagcacatagttacttcagtagaaaattccaaccgtcaaattctagtgactacactatttttgtcgctgaagttgcatcaacttgtaacgaagcacttttaagtgattatatggataaacatcttgatgatgaaaaacgcttattattattaaaccaagaattagaacgtttcagagctacattattccgacaaacaatgttcgcagaatttgagcataaaattcatgcaattgaagaagcaggtgaaccattaacgccaaccagaatgaatgaagaatatgccaaattaaataaattatacttcggtgattctgtagaaactgatgaagatattagtaaggaatggtcacgtattccacacttctatatgaattattatgtatatcaatacgcaactggttacagtgcagctcaaagcttaagtcatcaaattttaacagaaggtaagccagcagtagatagatatattaatgaattcttgaaaaaaggtagctcaaattatccaattgagatattaaaaaatgctggtgtagatatgacaacacctgaaccaattgaacaagcttgtgaagtttttgaacaaaaattgaacgcttttgaaaaattaatgaaagcttagtactattgtattcgcttacattatgaacagattgtgacaatttaaattaagtactattaaaaggttgaaatggtagagatagcatgttatattatgaacatgaaattaatcacataacaaacatacccctttgtttgaagtgaaaaatttctcccatcccctttgtttagcgtcgtgtattcagacacgacgtttttttatgttcttttttaataagagagaagtgaagttgtataaaaatgtattaaatatgcactttttatacattaacgattaatataagtctattatgtaccaaatttataatttgtataattttcgaactggttaaattcgaaaaatatcactaatatatttagatcgatgtgtaacattacgttctaataatttaatgttgcaaaattaagagtcagtaaaaagacctcgttacatttatggtgtacgaggtctttaatttatttattttgatttgattttaggcattttagatttccagaaatcgccgtctggatatttaagtttttcaattttttgttgaatggctaacttctttaactctttgtttaaaagtttttctggccattcataaatagtaagtaattcttccatcgttacaagttgttgttgctgtatataagtttctaatttaggaggaagattcttttcgataggtttacccatcaattcattaattatataagtatagatgtgatatgggtataatccttcgacttttaaaccttcttcatgaacatcttcactaaagaaaacgagagaaggggcttgttcgatttccatttctcttgcaatatgcaaatcaattttcaagctttcggttagtttacttttttgtaagtcgtctttaaatacttctaaatcaatacctgcattttgaatacagtcacaaatcattgattctgtaataatatctcttttaggtatgatttcattttgcattaaatgtataaatcgttcggcacgtacacgaccttgtaactcagctgctttataagctagggcgatgttatcaaagttggatgtactttgagcttggcatttcgttaatacttttaacgaaggatttaatatatgtctgatacgtatatattgattatattcaattcttaatttggataagattgctgataatttgaagcaatcggagctaaatggatcgaaaaatgaataaatttcgattttacttacaggtgatagattaatatcttcacgactcttattttccattattcgtaattctccagccatgtttattcacctacaattaattttaggaattcaccatatgattagcagttaatcttaagcgctcaaataaataatctccaacaccttgtggaaacgcagcgcgattaattgctgtctgcatattttctaaccatgcatctctttcaaattcagtgattgtaaaatccatatgtctttttcttagcataggatgtccgtgttcttcggtataaatgtttggaccgcccaaaaactgtgttaaaaattgtttttgtttacgacttgtttctgcaaaatctcctggaaacaggtgattaagtcgttcatctttttctacaagggtgtaaaaataatcaatcatatcgtataacgcttctttaccaatgatgtcatatggtgttgttgtcatttaatcacccattttcaaaaatttactattacgaacttaagttaatatataactaatataacatgattttaaacatttggaagaaatatgcatatttgccaatttaatttatattgtttgaaagtgtttcttttttcttgaaaaaacgttgaactttatttaaaggttgatgatgttcgaggtttagttcgtttaataaagattggaacttttgtaaaccttgattatagtctttaacttcgaactctaactcataatccgcagtatcgaaatactcacttttatctaaaacgagtaaatcacctttatatttagtttcttggcgatatgtcgttaatgcaccaagtattgataaagttgtatcttttacaccaaactgttcaactataatttgacgaatgtcatctggaagattgtcgtttgaaataatcaagttcatctctggtttaatgtcgacgatatagttgtattctaatagaccaacctttgctggtgtctttaaagtcatttcatattgattgtctttaactcttatgcgtagtgcagagcgatgttcctttaatttgaaatcgggtgtatcaatatagtaattgacttgcttaaaaagcacactgtctttaaaatatttctcttgcaatttattatagattgatgcagttatcatttgtttaaattctatttcatgatttgttgccatgatatgtatacacctcgtatcaaattcaatttatcttaactatattatgaatgacaaagttgaattttaaaagcaatttcctttatctattatcaatgttaatttgaccattaaaaatagtgttcgtaagtgttttgtattattgaattgtgttaaaatgttatggaataagaggaggattaagcatgcgtttatatattaatgaaattaaaattaaagatgacatactttattgttatacagaagattctattaaaggattatctgaagtaggacaaatgctcgttgatagtgataattatgcctttgcgtatacattagatgatggtaaagcgtatgcttatctcattttcgtacaagaaacatggacgatgttgcatgaaaacacgactaaaaaaattattatcaatgatgaactagaattgactgaattccaccaagaacttacttatattttagacaacataaaagggaataataattatggtaaggaatttgttgcaaccgttgaagaaacattcgacattgaataaagcggggtgaagcactatgaatcaatgggatcagttcttaacaccttataagcaagcggttgatgagttgaaagtgaaacttaaaggcatgcgcaaacaatatgaagttggtgaacaagcgtcgccaatagaatttgttactggtcgtgttaaaccgatcgctagtattatagataaggcaaacaaacgacaaataccatttgataggttaagagaagaaatgtacgatatcgctggtttaagaatgatgtgccaatttgtagaagatattgatgttgtcgtcaatattttaagacaaagaaaagattttaaagtaattgaagaacgagattatattcgtaacactaaagaaagtggttaccgctcgtatcatgtcattattgaatatccaattgaaacattacaaggccaaaaatttatattggctgagattcagattcgtacattagcaatgaatttctgggcaacgattgaacatactttacgatataaatatgatggtgcttatccggatgaaattcaacatcgtttggaaagagcggcagaagcagcgtatttacttgatgaagagatgtctgaaattaaagatgaaattcaggaagctcaaaaatattacacgcaaaaacgttctaaaaaacatgaaaatgattaacgaggtgttataaatcatgcgttatacaattttaactaaaggtgactccaagtctaatgccttaaagcataaaatgatgaactatatgaaagattttcgcatgattgaggatagtgaaaatcctgaaattgttatttcagttggtggtgatggtacattactacaagcattccatcagtatagccacatgttatcaaaagtggcatttgttggagttcatacaggtcatttaggattttatgcggattggttacctcatgaagttgaaaaattaatcatcgaaattaataattcagagtttcaggtcattgaatatccattgcttgaaattattatgagatacaacgacaacggctatgaaacaaggtatttagcattaaatgaagcaacgatgaaaactgaaaatggctcaacacttgttgtggatgttaacttaagagggaaacactttgagcgatttagaggcgatggattatgtgtatcaacaccttcgggttcaacggcttataacaaagcgctaggtggcgcactgatacatccttcacttgaagcaatgcaaattacagaaattgcctcaataaataatcgtgtgtttagaacggtaggatcaccacttgtattaccaaagcatcatacatgtttaatatcaccagttaatcatgataccattagaatgacgatagatcatgttagtatcaaacataaaaatgttaattcaatacaataccgtgtagcaaatgaaaaagtgaggtttgcacgttttagaccattcccgttctggaaacgtgtacacgattctttcatatcaagtgatgaagaacgatgaaatttaagtatcatatatcacaacaagaaactgttaaagcttttttagcacgacatgatttttctaagaagacagtgagcgccattaaaaataatggcgctttaattgttaatgatgaaccagtcacagtacgtaagcaattaatgccaaatgatatattagaaattcatttaccgcgagaaataccgagtgttaatttaataccttatgctcgtaagctagaagtattgtatgaagatgcttttatcatcatagttactaaaccaaacaatcaaaattgtacgccttcgagagaacatcttcatgaaagtttaatcgaacaagtactatatcattgtcaggaacatggtgaaaatattaacccacatattgttacgcgtctagatcgtaatacaactggtattgtgatattcgctaaatatggacatatccatcatttattttctaaagtaaacttgaaaaaaatatatacttgccttgtatatggcaaaacccatacatctggtattattgaagctaatattagacggtcaaaggatagtattataactagagaagttgcctcggatggtaaatacgctaaaacatcttatgaagtaataaatcagaatgataaatacagtttatgcaaagttcatttgcatacgggacgtacacatcaaattcgtgtacattttcaacatattgggcatccaattgtgggagattctttgtatgatggttttcatgacaaaattcatggtcaagtactgcaatgtacgcaaatatattttgttcatccaatcaataagaacaatatttatattacaattgattataagcaattacttaaattattcaatcaactctaattcacacagggggtgtaagtatgtcaatgaacacagatgaaaaagagcgtgttcaagaggaattatatgatgagacattattagatcaatacttagaaaatgatgatattgatcaatttagagatgaatttctagcattacacacatatgaacaaagtgagtattttgaagatactaccgatgaaaatagacaaaagatttttcaatatttatcacctgaagaggttgcaaatttctttgatcaattagatattgatgacgatgaatatgagttgctatttgataaaatgaatgcgacatacgcaagtcacatattagaagaaatgtcatacgataatgcagtagatattttaaatgagttgactaaaccaaaagttgctagtcttttaacattgatgaataaagatgacgcgaatgaaatcaaagcattacttcactatgatgaggatacggccggcggtattatgacgacggagtatttatcacttaaagcgcatacgcctgttaaagaagcgttattattggtcaaagcgcaagcgccagacgcagaaacaatatatgttatatttgtcgttgatgatgatggtaaattagtaggtgttttatcactaagagatttaattgtagctgaaaatgatgcttatattgaagatattatgaatgaacgtgtcattagtgtgaatgtagcagacgaccaagaagatgttgctcaagttatgagagactatgatttcatggctgtacctgttatagattaccaagaacatttgcttggtatcatcacgattgatgatattttagacgttatggatgaagaggctagtgaagactactctcgtttagccggggtatcagatatcgattcgactaatgattcaatcattaaaacagcattaaaacgtttaccatggttgattattttaacatttttaggaatgattactgcgacaattttagggagatttgaaaaaacattagaaaatgtagcgctactcgcagcgtttattcctattattagtggtatgtcaggaaattcaggtacacaatctttagccgtttcagttcgtaacattacgacaggggaaattaatgagcaaagtaaatttagaattgcattaagagaagcgggaagtggtgtattatcgggcgttgtatgttcaacaatattatttacaattattgttgcaatatatcatcagccacttttagcattaatcgttgcaggaagtttaacttgtgcgatgacggtggggacgtttgtaggttcgatgattccattattgatgaataaattaaatatcgatccagcagtggctagtggaccatttattacaacaattaatgatattattagtatgttgatttattttggtttagctacatcatttatggcttacttaatttaaggaggagttatggagtttttatctttagttattgttgttttagcagcgtttttaactccaataattgtcaatcgattaaatattaatttcttgccagttgttgttgcagaaattttgatggggattgtgattggaaattcatttctaaatatagtagaaagggattcaattctaaatattttatcaacgttaggctttatctttttaatgtttttaagtggtttagaaattgattttaaagcttttaaaaaagataaacgcgcacgtcaaggacaaaatgatgatgaatcctcaattccagggcatcttaatctagcgttaactgtatttgcatttattatgattatttcgattcttttagcgtatgtatttaaatggcttggattagtggatgatgtgttattaatggtcattatcatttcaactatttccttaggcgtagttgttccaactttaaaagaaatgaatattatgagaacaactatagggcaatttatcctattagtagcagtacttgcggacttagtaactatgattttattaacggtctatggcgcaatcaatggtcaaggcggcagtacaatatggttaataggtatattagttgttttcacagcaatttcatatattttaggtgttcaatttaaaagaatgtcatttttacaaaaattgatggatggtacgacgcaaatcggtattcgtgcggtatttgcattaataatattattagtagccctagcagagggagttggcgcagaaaatatattaggtgcattcttagcaggtgtcgttgtttcattattaaatccagatgaagaaatggttgaaaagttagactcatttggttatgggttctttattcctattttctttataatggttggtgtagatttaaacataccttcattaattaaagaaccgaaattactaattatcataccgattttaatcgttgcatttatcatttcaaaattaattccagtcatgtttattcgacgttggtttgatatgaaaacaacgattgcatcagcatttttattaacatcaacattatcgctcgtgatagctgcagccaaaatttcagaaagattaaatgctatttcagctgaaacgtcaggtatattaattttaagcgcagtcattacatgtgtattcgttccgattattttcaaaaaactgtttccagttccagatgagtttaaccgtaaaattgaagttagtttaattggtaaaaatcaattaacgattcctatagcgcaaaatttaacatctcagttatatgacgtgacattatattatcgcaaagacttgagtgatcgtcgtcaattgtcagatgatatcacgatgatagaaattgctgattatgaacaagatgttttagaacgactaggtctgtttgaccgagacatagttgtttgtgctacgaatgacgatgatattaaccgaaaagttgctaaattagccaaagcacatcaagttgagcgtgtcatttgcagacttgaaagcacaacggacgatacagagttagttgattcaggtattgaaattttcagtagctacttaagtaataaaatcttattaaaaggtttaattgaaacacctaacatgttgaatttattaagtaatgttgaaacgtcactatatgaaattcaaatgttaaattataaatatgaaaatattcaattacgtaatttcccattcggaggagacatcatcttcgtgcgtattatccgtaataatgagtcgattgttccgcatggagatacacaattgcgatatggagatcgcttaattgttaccggtgctaaagaatacgttgatgaattgaagcaagagttagaattttatttttaacaataatgatattaaaatgcagacgtattttagtacgacgtaaaattaatgattttaaaatgctagtatgtatatgattttgataaataaatgctttttacgtaaatcaagtttgatacagaaaggactaaatcaaacatttatcgttgtaatacgtttaaataactttattaaaaagtcataatagtgttaaaatgtattgacgaataaaaagttagttaaaactgggattagatattctatccgttaaattaattattataaggagttatcttacatgttaaatcttgaaaacaaaacatatgtcatcatgggaatcgctaataagcgtagtattgcttttggtgtcgctaaagttttagatcaattaggtgctaaattagtatttacttaccgtaaagaacgtagccgtaaagagcttgaaaaattattagaacaattaaatcaaccagaagcgcacttatatcaaattgatgttcaaagcgatgaagaggttattaatggttttgagcaaattggtaaagatgttggcaatattgatggtgtatatcattcaatcgcatttgctaatatggaagacttacgcggacgcttttctgaaacttcacgtgaaggcttcttgttagctcaagacattagttcttactcattaacaattgtggctcatgaagctaaaaaattaatgccagaaggtggtagcattgttgcaacaacatatttaggtggcgaattcgcagttcaaaattataatgtgatgggtgttgctaaagcgagcttagaagcaaatgttaaatatttagcattagacttaggtcctgataatattcgcgttaatgcaatttcagctggtccaatccgtacattaagtgcaaaaggtgtgggtggtttcaatacaattcttaaagaaatcgaagagcgtgcacctttaaaacgtaacgttgatcaagtagaagtaggtaaaacagcggcttacttattaagtgacttatcaagtggcgttacaggtgaaaatattcatgtagatagcggattccacgcaattaaataatatcattcaacagctttgttcacgttatcatatatgtgagcaaagcttttttgcttttataataatcggactgatggaaaattatttgatatttcatctgactgattttttttatgcacaaaaaaatctcctcaaaagctgtagtttcaacttttgaggagatagtatcttatattcttaaaagacatccacagaattagtccttaacattactgtttgctttatcaataatgcgttggcggtatttgaaaatattactaacaaccgttttaagtacagcatataatggcactgcaatcagaactaatgtaaagccacctaaatctcctgctgctaaaataacaacgataattgttaaaggatggatacttaaagatttacccattacatttggcgtaatgatattaccttcaagttggtgtgcaattaatgtaatgatacaaacccatataaatgtagtaggactatctataataccgagtattgctgcaggtgcaaatgataaccatgaacctaagaaaggaattaagtttgcgacaccagcaaatagaactaataaaggaatatatggtaagtcaataattgaataaccgatatataagaatatacctaaaataacactgacagttacttgaccttgaatgtaagattttaatgtaaagtttaaatcagttaataaatctacgaaaaatactttacgttcacctttgaaaaatttagcaacagctgggataaatttttcatggtcttttaacatataaattaagaagaatggaaccataatcaataagaagatggttgaaattaatgatgtaatgtactgtaatgaattagataaaatattagtaacgccatcacccattgatttaaccatatttgtaattctacttgttacatcttcaggtaatttatccatttgagctagtgcgaatttaataatttgctctgcttctttttgtagggcaggtgtctgactaattaaattgttgatatttgaaatgatgattggtgcaacaaacgcaacaattaagccgataatagcaaacaaagctaacatgattgttgttatactagcccatcttggaaaaccgactttttcaagtaagttttgaaaaggtagacagatataaaataaaaaaccactaattaaaaatggaagaaatacagaaccgatgattgtagctattggagtaaatacttcgtgcacttccataaatagtttgatgagaatgaacagcataatcagagcgatgccagttcggaaccaaaccttgtttaacataaacgatgttcctcctatttttctaaacttagttattatttagtatatcctaaatagcagtgcttaaaaaggttaatattttttaaatatacttaaattaaccattcactttctattttaagatatttactttcaatagtttgtgagacttttcaatgactcgtaagtctgcaattggatcaaacagcaccagtttatatgaataacttattttaatattaaacgtgtttaaataatgaaatgatcatattaatatttataagaatattctgaaaaatatattgaagtgtctcgtgcttaatcgtataatatttttatgtttaaacaatagggggaatcttatgattgaaaaattagtaacctttttaaatgaggttgtttggagtaagccattagtttatggtttgctaattactggtgtgctatttacattgcgtatgcgattttttcaagttagacattttaaagaaatgattcgattaatgtttcaaggagagaagtctcctaatggtatttcaagttttcaagcgatagccatgtctttagcaggcagggttggtacaggtaatattgtcggtgtatctactgcaatatttataggaggacctggtgcagtattttggatgtggattactgcgtttttaggtgcaagtagtgcttttattgaatctacacttggtcaaatattcaagagagttgaaaataatgaataccgtggtggaccagcgtattatattgaatatggtattggtggtaaatttggtaaaatttacggaattatctttgctattgttacgattatctcagtaggtctattgcttcctggtgtgcaatctaacgctatagcaagttctatgcataatgcgattcatgttccacaatggttaatgggtgctattgttgtagttattttgggattaattatttttggtggtgtacgtagtattgccaatgttgcaacagccgttgtaccatttatggcaattatttacatactgatggctgtcattatcatttgtatcaatatacaagaagtgccagcgttatttgcattaattttcaaatcagcatttggattacaatctgcttttggtggtatcgttggcgcaatgatagagattggtgttaaacgtggattatactcaaatgaggctggtcaaggtacaggtccacacgcagcagcggcagcagaagtatcacatccaagtaaacaaggtctagtacaagcattttcagtttatattgatacattatttgtatgtactgcaactgctctgattatacttatttctggtacatataatgtgactgatggtacggttaatgcgaatggcacaccgcatttaattaaagatggcggtatttatgttgaaaatgcaacaggtaaagattattcaggtactgcgatgtatgcacaagccggcattgataaagcgttccatggcagtggttatcaatttgatcctactttctctggcgtaggttcgtactttattgcatttgctttattcttctttgcatttactacaattttgtcgtactactacattacagaaacaaatgttgcttatttaacgcgtaatcaaaataatcaagtttcatcgatatttattaatattgctcgtgtgattattttgttcgctacattttacggtgcagttaaaacagctgatgtagcatgggcattcggtgatttaggtgtaggtctaatggcttggttaaatatcattgcgatttggattttacataagcctgccgtaaatgctttaaaagattatgaaattcaaaagaaacgtttaggaaacggttataatgcagtttatcaacctgatccgaataaattacctaatgctgtcttttggttgaagacatatccagaacgtttaaaacaagcacgtgccaaaaagtaatctacttttgtttatagtatatgtagtgatcatttgataaaaaaagaaacagcattgataattttaggtgctcagaaatttgaattttaaaaatatagtgtctcttggtacaataacaatacaactactagggggcacttttttatgtcagaatttaaaactggtaagattaataaacatgttttatatagtaatattttaaatagagatgtcacgataagtatttatttaccagaatcttataatcaacttgttaaatataatgtcattctttgctttgacggattagattttttacgtttcgggagaatacaacgtacatatgaatcgttaatcaaagaagcgcgtattgatgatgcgatcattgttggattccattatgaagacgttgataagcgtagagaggaatttcatccacaaggaagtcgttctcatttaactattcaatcagtcggtaaagaaatattgccatttattgactcgacgttttctacactgaaagtaggtaatgcaaggttattagtaggggatagtttagcgggtagtattgccttattaacggcgttgacctatccaacgatttttagtcgtgtagcaatgttaagtccacattcagatgacaaagtattagataagctaaatcaatgtgctaataaagaacaattgacaatttggcatgtcattggtctagatgaaaaagattttactttaccaacaaatggtaagcgtgccgatttcttaacaccgaatagagaattagctgaacaaattaagaaatataatataacttattattacgatgaatttgaaggtggtcaccaatggaaagattggaaaccattgctgtcagatatattattgtattttttacgtaaaaacacagatgatcaacattatgagtaatttacattagtagatttagtatgaattgtcttcatatagtttggtctataatataatttataaaagattttactgtttgatttaatttaaatttgtcgaaattgcaaaagatgtataatgaattatttttaatgtaacggttttcaaagaaatttgatataatagcaataggttaaacaaaggaggaattcagatgattttaggattagcattaattccatcaaagtcatttcaagaagcggtggattcttaccgtaaaagatatgataaacagtattcacgaattaaaccacatgtgacaattaaagcgccatttgaaattgaagatggtgatttagattctgtcattgaacaggttagagctcgtattaatggtataccagcagtagaagttcatgctacaaaagcttctagcttcaaaccaacgaacaatgtgatttactttaaagttgcgaagacggacgacttagaagaattgtttaatcgctttaatggagaagatttctatggagaagctgaacatgtttttgtgccacactttacaatagcacaaggactatctagccaagaattcgaagatatttttggtcaagtagcattagctggggtagaccataaagaaattatcgatgaattaactttgttacgttttgacgatgacgaagataaatggaaagttattgaaacgtttaaattagcttaagtaacataatagtattgttaatcgtagtatgtttgaattaataagaaaatggtcatttttattgaatgtaataaaaatgaccattttctttattttaaaatacgttttaaccttacttagctttttctctatttgctataaagtagcttccataaaatacagctaagactaaaaagattaatgccgagaaataaaatgtattgtttaaatcgttggtaaattgtgtaattaatccgccaaataatggccctatcattgagccgaatccttggatactattaaaaacaccccaagtttcttcttgttcatctgatttgataaatcgtgccataaaggtattccatgctggtaataagatgccatacattagaccgatagctaaagcgataatccacacgatgtgaatattaacaatcatagatagagtaaaaattaatatcatgtataaaataaatccgcttagaataacaccatacataaagtttctgctgcggttatctattagtttcgataaaaatagcatcgaaactgcacagccgataccaccaataatgattgcaacagtatattcaattgtgcttacgttaataaccttagtagcatatgttggtaatataggaactagggcagcaattgcggcaccttgtaaaagaataccagggaacaacaataaatggcgctttgtcacatcaacaatttgtctcaattgagctttaactggacgagtattataatttgttaactttacatcgacaaaataatataatatccatgcaattaaaacgactaaagacatcatgaaggcaaagcgtgttgggtgcactttgataagtagattcataaaaaccatacctaccaataggcctaacaaccatgaaaaataaacatagcccatttgtttgccacgtttatcttcttcaacactggataacataatgacccaaataggactaactgcaataccgagcatcatagcactaaatatgattacaaaaggtgatgctggaaaccaaataactaaaaataaacttgtaaatgctaaaataaatccagtcgttaaaacgatttttgtgccgaattttttcagtaaaaatcctataacaaagtttgtagatgcatcagcaataaaatgtattgaaaatgctagagacgttattgctacagcaatggatgtaactgttggcaagaaattaatatagcttaggatatacatgcctctcgcaaattccattaaaaataagataataagcattaaaatgaaatttttatgattagcgtaattatttaacgaagaatcttgcatataaaggaacctttccataaatctcttgtggttgtgatgaatgaccgattaaatcaagtaagtctcgacatattgtctgtgtagcatacttaattttatcttgttccattgtactaatcatgttagttaattgctcattaccgttcgttaaacttgctacaatttttattgcttcttctggagtatcagcgattttaccaaaacctttttcttcaaagtaaagggcattttcaagctcttgaccaggtgcaggatttaggaaaatcattggaatacaacgggcgaaaccttcagttattgtgataccaccaggtttcgtaatcataagttgacttgatgccatccattcattcatgtgtttggtataacctagaatcaatacattctcgttagatttaaacttagctattaaagaacgctttagctctttgctcttaccacaaatcataactacttgtgcatttgcacttttcgctaatatatcagtaatcatcgtgtcaaaacctttagatacaccaaatgcaccagctgacattaaaatagtttgcttatctggatctaagttgttgtctattaaccactgcttttgattaataggcgtttcaaatttgttatcaataggaatacctgtcactttaactgttgaaggatcaatacctacgtctatgaagtcttgtttcgtttcttttgttgccacataatatcttgttgaatacggcgtaatccagtttttatgtaagcgatagtctgtcatcactgtagcaactggaatattaatgttaaattgctcagttagtaccgacataactggtgtaggaaacgttaataatattaaatctggcttttcttttatcaataaattaattaacttattaagtccatagtatttgtaaaaacatttgtctagtttatctgggcggctgtaataaaaccctttgtacatatttctaaaatatttaaagctattgatataccattttttacaaatagaagtcaaaattggatgagcttccataaataaatcgtgctcaatgacgcttaaatggtctagattcatatcattaagttgattaacgatactctgtgtaacttgcatatgaccgttaccgaatgagccagtaataatcaatatctttttattttgagtaaccattaatagccaccctccgttagtttgaaaattttatttaagtgtaacttattttacggcattataaaagaaataaagacgcaaagtcgttacatttatagcaattttaatcaatagatgaattgatacaaaataaaacgttattttataaagcaatttattgttctatgttttatttgtatatttaaaattatccagtatacaattatagcatatttttggaaacaattatgatattataccatgttacaagatggttttaataatttaagatgagccataattgtaaaactaattcataataccgtatgttttatttttaatagtagaaattagaaaatgctgattagtaggatataacagtgaaattataaatttattaacatcaacaaaacgtgtataataaacatattgtagaaaaaggagcggttcagtttggatgcaagtacgttgtttaagaaagtaaaagtaaagcgtgtattgggttctttagaacaacaaatagatgatatcactactgattcacgtacagcgagagaaggtagcatttttgtcgcttcagttggatatactgtagacagtcataagttctgtcaaaatgtagctgatcaagggtgtaagttggtagtggtcaataaagaacaatcattaccagctaacgtaacacaagtggttgtgccggacacattaagagtagctagtattctagcacacacattatatgattatccgagtcatcagttagtgacatttggtgtaacgggtacaaatggtaaaacttctattgcgacgatgattcatttaattcaaagaaagttacaaaaaaatagtgcatatttaggaactaatggtttccaaattaatgaaacaaagacaaaaggtgcaaatacgacaccagaaacagtttctttaactaagaaaattaaagaagcagttgatgcaggcgctgaatctatgacattagaagtatcaagccatggcttagtattaggacgactgcgaggcgttgaatttgacgttgcaatattttcaaatttaacacaagaccatttagattttcatggcacaatggaagcatacggacacgcgaagtctttattgtttagtcaattaggtgaagatttgtcgaaagaaaagtatgtcgtgttaaacaatgacgattcattttctgagtatttaagaacagtgacgccttatgaagtatttagttatggaattgatgaggaagcccaatttatggctaaaaatattcaagaatctttacaaggtgtcagctttgattttgtaacgccttttggaacttacccagtaaaatcgccttatgttggtaagtttaatatttctaatattatggcggcaatgattgcggtgtggagtaaaggtacatctttagaaacgattattaaagctgttgaaaatttagaacctgttgaagggcgattagaagttttagatccttcgttacctattgatttaattatcgattatgcacatacagctgatggtatgaacaaattaatcgatgcagtacagccttttgtaaagcaaaagttgatatttttagttggtatggcaggcgaacgtgatttaactaaaacgcctgaaatggggcgagttgcctgtcgtgcagattatgtcattttcacaccggataatccggcaaatgatgacccgaaaatgttaacggcagaattagccaaaggtgcaacacatcaaaactatattgaatttgatgatcgtgcagaagggataaaacatgcaattgacatagctgagcctggggatactgtcgttttagcatcaaaaggaagagaaccatatcaaatcatgccagggcatattaaggtgccacatcgagatgatttaattggccttgaagcagcttacaaaaagttcggtggtggccctgttgatcaataaaagatttattgatgaaggtaaaactattgatgtttatttattcgaagcattaaataaccagataatcattgctataccagattggttttggtcatatcagatggcaatgacattagatgaagaaacttgttttgaagcaatactcatgcaattgtttgtttttaaagaagaggaagaggcagaatcgattgcatcacaactaacagattggatagaaacatataaaaaggagaaagactaatgaacttaaagcaagaagttgagtctagaaagacttttgcgattatttcacatcccgatgcagggaaaacaacgttaactgaaaaactattgtacttcagtggtgctattcgtgaagcgggtacagttaaagggaagaagactggtaaatttgcgacaagtgactggatgaaagttgaacaagagcgtggtatttctgtaactagttcagtaatgcaatttgattacgatgattataaaatcaatatcttagatacaccaggacatgaagacttttcagaagatacgtatagaacattaatggcagttgacagtgctgtcatggtcatagactgtgcaaaaggtattgaaccacaaacattgaagttatttaaagtttgtaaaatgcgtggtattccaatctttacattcattaataaattagaccgagtaggtaaagaaccatttgaattattagatgaaatcgaagagacattaaatattgaaacataccctatgaattggccaattggtatgggacaaagtttctttggcatcattgatagaaagtctaaaacaattgaaccatttagagatgaagaaaatatattacatttgaatgatgattttgagttggaagaagatcatgcaattacaaatgatagtgcttttgaacaagcgattgaagaattaatgttggttgaagaagcgggtgaagcctttgataatgacgcgctgttgagtggagacttaacacctgtatttttcggttcagctttagctaactttggtgtacaaaatttcttaaatgcatatgttgattttgcgccaatgccaaatgcgagacaaacaaaagaagacgttgaagtaagcccgtttgatgattcattttcaggatttatctttaaaattcaagccaacatggaccctaaacaccgtgatagaattgcctttatgcgtgtcgttagtggtgcatttgaacgtggtatggatgttactttgcaacgtactaataaaaagcaaaagatcacacgttcaacgtcatttatggcagacgataaagaaactgtgaatcatgctgtagcaggcgatatcattggactatatgatactggtaattatcaaattggagatactttagttggtggaaaacaaacctacagtttccaagatttaccacaatttacgccagaaatttttatgaaagtttctgctaaaaacgtcatgaaacagaagcatttccataaaggtattgaacaattagtacaagaaggtgcgattcaatactataaaacattacacacaaaccaaattattttaggtgctgttggtcagttacaatttgaagttttcgaacatagaatgaaaaacgaatataatgttgatgttgttatggagccagtaggccgtaaaattgcacgttggattgaaaatgaagaccaaattacagataagatgaacacatcaagatcgattttagtgaaagatagatatgacgatttagtattcttatttgaaaatgaatttgcaacaagatggtttgaagagaaattccttgaaattaaattgtatagtttactttaacagctcaattgtataatcgaatttgttacattaaaaataattgtttcgttgaagaaaaataaattgtatattttaaaagaaaaaggtatactatgatgtatcaaatgaataacctatggcattttgtcagaggggagtaacttaagaatcatgaccgtataaatgattcgacactttatcgtcattacgaagatatcttccggtaaagtgggcaatttaaattgcttagtgagacctttgctatttatttagcataggtctttttgtttgtacttaacttatttatttaaaggagttgtacatgttaatggatccaagtttgatcttaccttatttatgggtacttgtcgttttagtatttttagaaggcttattagcagcagataacgcgattgttatggctgtaatggttaagcacttaccacccgaacaacgtaaaaaagctttgttttacggtttgttaggtgcatttgtatttagatttttagcattattcttaattagtattatcgcgaacttttggtttattcaagctgcaggagcggtttacttaatttatatgtcaatcaaaaatctgtggcagttctttaaacacccagaaattgaaagtcctgaagctggagatgatcatcattatgatgaatctggtgaagagattaaagcaagtaacaaatcattctggggaactgtgttgaaaatagaatttgcagatatcgcatttgccattgattctatgcttgctgctttagctattgctgtaacacttcctaaagttggtattcactttggtggtatggacttaggtcagttcgtagtcatgttcctaggtggaatgattggtgttattctaatgcgttatgcagcaacatggtttgtagagctattaaacaaatatccaggacttgaaggtgcagccttcgcgatcgttggttgggtaggtgttaaattagttgtcatggtattagcgcacccagacatcgctgtattgcctgagcacttcccacatggcgtattatggcaatctattttctggacagtactaattggattagtaattatcggttggttaggttcagttgttaaaaataaaaaatcgcataaataattgatgtgaagcggacaatcttaatttagtttaaggttgtcctttttcatttaattgagtgatttatgaaaaatggattttgaagaatgtgaatcaaaagatgcgatatagtattaagaaaatgtgccttttatatttagcattttttcaatagaaattatatagattttaaagcaaattaggtgttaatgtgtcataatgataagtgattttattgaatggagtggacattagtggatattggtaaaaaacatgtaattcctaaaagtcagtaccgacgtaagcgtcgtgaattcttccacaacgaagacagagaagaaaatttaaatcaacatcaagataaacaaaatatagataatacaacatcaaaaaaagcagataagcaaatacataaagattcaattgataagcacgaacgttttaaaaatagtttatcatcgcatttagaacagagaaaccgtgatgttaatgagaataaagctgaagaaagtaaaagtaatcaggatagtaagtcagcatataacagagatcattatttaacagacgatgtatctaaaaaacaaaattcattagattcagtggaccaagatacagagaaatcaaaatattatgagcaaaattctgaagcgactttatcaactaaatcaaccgataaagtagaatcaactgaaatgagaaagctaagttcagataaaaacaaagttggtcatgaagagcaacatgtactttctaaaccttcagaacatgataaagagactagaattgattctgagtcttcaagaactgattcagacagctcgatgcagacagagaaaataaaaaaagacagttcagatggaaataaaagtagtaatctgaaatctgaagtaatatcagacaaatcaaatacagtaccaaaattgtcggaatctgatgatgaagtaaataatcagaagccattaactttaccggaagaacagaaattgaaaagacagcaaagtcaaaatgagcaaacaaaaacctatacatatggtgatagcgaacaaaatgacaagtctaatcatgaaaatgatttaagtcatcatacaccatcgataagtgatgataaagataacgttatgagagaaaatcatattgttgacgataatcctgataatgatatcaatacactatcattatcaaaaatagatgacgatcgaaaacttgatgaaaaaattcatgttgaagataaacataaacaaaatgcagactcgtctgaaacggtgggatatcaaagtcagtcaactgcatctcatcgtagcactgaaaaaagaaatatttctattaatgaccatgataaattaaacggtcaaaaaacaaatacaaagacatcggcaaataataatcaaaaaaaggctacatcaaaattgaacaaagggcgcgctacgaataataattatagtgacattttgaaaaagttttggatgatgtattggcctaaattagttattctaatgggtattattattctaattgttattttgaatgccatttttaataatgtgaacaaaaatgatcgcatgaatgataataatgatgcagatgctcaaaaatatacgacaacgatgaaaaatgccaataacacagttaaatcggtcgttacagttgaaaatgaaacatcaaaagattcatcattacctaaagataaagcatctcaagacgaagtgggatcaggtgttgtatataaaaaatctggagatacgttatatattgttacgaatgcacacgttgtcggtgataaagaaaatcaaaaaataactttctcgaataataaaagtgttgttgggaaagtgcttggtaaagataaatggtcagatttagctgttgttaaagcaacttcttcagacagttcagtgaaagagatagctattggagattcaaataatttagtgttaggagagccaatattagtcgtaggtaatccacttggtgtagactttaaaggcactgtgacagaaggtattatttcaggtctgaacagaaatgttcctattgatttcgataaagataataaatatgatatgttgatgaaagctttccaaattgatgcatcagtaaatccaggtaactcgggtggtgctgtcgtcaatagagaaggaaaattaataggtgtagttgcagctaaaattagtatgccaaacgttgaaaatatgtcatttgcaatacctgttaatgaagtacaaaagattgtaaaagatttagaaacaaaaggtaaaattgactatcccgatgtaggtgttaaaatgaagaatattgccagtctaaatagttttgaaagacaagcagttaaattgccaggaaaagttaagaacggtgttgttgtagatcaagttgacaacaatggtttagcagatcaatctggtctgaaaaaaggtgatgtaattactgaattagatggcaaacttttagaagatgatttacgctttaggcagattatatttagtcataaagatgacttgaaatcaattacagcgaagatttatagagatggtaaagagaaagaaattaatattaaactaaaataatgttgaggtgaacaacgtgtcaatttttagccagtttttaaaaagatcaagccctcaacaaggtattgtattgtactatatcgtcgcaattgtcattgcatttttattattaaacttaccgtatgttcataaaccaggtgtagaagtaaatccaattgacacattatttgttgccgtatccggaattagtgttactggattgtctccgataagtattgtcgatacctattctacatttggacaattaattatcctcgtgatattaaatattggtggaattggcgtcatggcaattggtacgatgttatgggtggtactaggtaaacatattggaattagagaacgtcagttaattatgttagataataacaaaaacacaatgagtggtaccgtcaaattgattattgatattgtaaaatcaatatttgtaatcgaactcgtaggagccatgttattagcattttacttttatcgagataatccagatttaaaatatgcaatcatgcaaggtgtttttgtttctatttctgccactaccaatggtggattagatattacaggtaagtcattaattccttatgcacatgattattttgtacaagcgatagttatatttttaataattttaggatcaatcggcttcccagtattattagaagttaaagcttatattcaaaatagggttactaattttagattttcattatttactaaaattacgacatcaacatatttattcctatttattgttggggtattagccattctattatttgaacataaccatgcgttcaaaggtttaagttggcatcaatcgttattctattcgctgtttcaatcagcgactacaagaagtgcgggtcttcaaacaattgatgtgacaacactaagtgaccccactaatattatcatgggtattttaatgtttataggatcttcgccaagttcggttggtggcggtattcgtacaacaactttcgctattttaattttgtttttaattaactttagtaataatgccgataaaacatccattaaagtttacaatagagaagtacacattatggatattcaacgttcatttgcagtatttacaatggcgacaattttaacatttttaggaatgctaattatatcagctactgaaaatggtaagcttacatttttacaagtattttttgaagtcatgtctgcatttggaacttgtggactatcgcttggtgtcacaagtgatattagtgatatttctaaggtcgtactaatggtactcatgtttataggacgtgttggcttaatatcatttatcattatgatagcaggacgtcgagaaccagataaattccattatccaaaagaacgtattcaaataggataatataatagcaatctaagtttagttaatatagattttaactggaacttagattgcttttttagtttgtatttttaacttattttataagacgattggttttcaaaatggtaaactagtaacaatgagaggtgtaacatgatggaaaaaaatgaaaacattaatgtagagattttaactacgtcagatatgcatagtcatttcttaaatggtgattatggttcaaatatttatagagctggtacttatgttaaccaaataagagcacaaaatcatcgcgtcattttattagatagtggcggaagtttagctggctcgttagcggcctattattatgctattgttgcaccttataaacgacatccaatgataaagttaatgaacagaatgcattatgatgctagcggtgtgagtccaagtgaattcaagtttggtttatcatttttaactcgttcaattgctttggcacgttttccatggttatcagcaaatattgaatacaatgttactaaggagccttatttttcaactccatattgtattaaacattttggtgacttaaaaattgctatcgtaggcgtcacagcagatggtttaatggaaaatgagtattctgaaatggagcaagatgtatctattgaaaagacattagtggcatcaaaacgttggattagatatatccatgaagttgaagagccagattttttgattgtaatttatcatggtggattgaataaaattagtaatagtacgaaaaataaaaaggcaagttcgaatgaagctgaaaaattaatggaagaactcggtgttatagatttaatgattacagctcatcagcatcaaacaatagtaggtcaagatcatgaaacgtattatgttcaggctggtcaggatgccaaagagcttgtacatctttcgattaattttaaaaagagaacaacaacttatgatgttgaaagcattgattctaaagtgattgacttaaatgagtatgaagaggatcaagaattattagatttaacattctatgatagaaaagcagtggcttattggtcacaggaaatcataagtgataaaggtttgatgttatcagtgaatgggttacaagatttagtctgtcaaacacatccattttcgcaattattacatgatgcaattcagcttgcatttgataatgatataacatgtgtccacgtgcctatgaacggagagaaggggttgagtggacagattcgaaatgaagatttgtatcatgcatacccatatccagataagccaatggatatgacaattagtggtcaaaatatcaaagatatattggagtatagttattcacatttagattttgttaacgagcaattaagcttaacaattattgatgaaacgttatgtacaatgtggcaaggattcaattatgagattgatatgaatcaagaacctgggcaacgagtaatgttagatcaaattgatttgactaagagttatagagttacaatgactgactattgttatcgtaactacaagaattatttaaaaaatgctattatacatgaatcgtacgatgaaacaatgagtacattaattgcagagaagttaagagatccgaattatcgtatttcatgtagtgataattttgtagttaaaaacaggtaaatattgctatgtaataaattaattataagttcaacaagtataaaaacctttcttagagaagattatctaggaaaggtttttagaattttaaaattgatataaaagaacagtgaaattctcattcattatatataagtaaacaaaaaagctaaaatggtatataccattttagcaagtaacggaaacggagggattcgaaccctcgcgccgctttcgcgacctacacccttagcaggggcgcctcttcagccaacttgagtacgtttccaatggctccacaggtaggactcgaacctacgaccgatcggttaacagccgatagctctaccactgagctactgtggattaatttgtatgtgtttgaatatcaagcacaaatattattataacaagattaagttaatttgcaatagataccttaaaaaaatatgcagaacatttacactatatttataaaacattccgcatattttaaaaataaacaatttatttatcttcaaataaagaatagcgtgtcaatgcttcaaacacattcaatgtggctttattataatctattggttggtcgggattttttgatatcatgcgagattgtttatctaccatgtaatagtaaaaaatggaattgttatattgatgccataaactgtggtatgaaacatgaagaatgatagattcattattaataaatgtcactttacatttacgattttttaattctttaatactttcgatataatgcatatttaaccaaatattttcattttgtctgtcagaatgtgttgggaaaaaataagttggaaataatggtgttagtaaaataggtggtttactagaaatgccagtaatgcggtttgtctctgctttcttgccaagataagtattaccataaaatttgcaagagcgttcaatgattttctggactttaaaaggattttgaatacgcgttttgtcaaaccgaattatttcactaccgtttctttgatcgtcatcatcaaatgctggtcgaataaccatgtctcctttgcgtatcacataaatattttgagaatacataagcaaaacctcgctttattaagttttaaaccattaatataaaaatacaattaatgatataaagatattttataataaaattccgagttgtcaagttattattttggtgaaaatgtacaataatttttaactaatagtcagaatattcattgatttcaaaattagaaaaatgtatacttattataaattaaagaaaggtagtggtttctatgaaatacaatactaatgttaaacatacaactttagaagcgtttgtcacaactgtcaatgatttgggtattgaattaattatcaatgaagcacttcgagaggtaagaaaacgacagctcatagaacttatagatgacgcactcgtcaataaagatgaagcagcatttaatcaatatacggcagaatacaaaaatttggaggcatttctcggtgaataacattgattcgaattccataacgcaatcataaaaggactattcttaacatctcatacatgtaagaatagtcctttaatcgtttatgacattaatctaattaattcatgtctatctatgtcaccgaaataatgatataaatcatattctgatagtgcttcttctatgtgctcaaagtcgtgtagacagccaactaatgcattttcaagatcagtgacatctccgacaccaaagaaatcaccgaaaatttttgcatgttcgattttacctcgtttaacatcaaacttaatttgtacaaatcctttttcaaatttttcctcgcgttcaaagttatatttagggtttctaccataattccatgcccaagttctatatttgtcgttacttaacttttcaatattttcccaatcttcatccgttaatttatattcttctacttcagtttctccaaagatagttttcaagatgatttttttaaattcttcaatttctaaagggtcatttaaaaattcttgaatgtttgctactcgtttacgaacagatttaataccttttgatttaatcttagctggattaacttttagtgcattctgaacttcgtctaaatcactatttaacatcaacgtaccatgactaaacattctatttttaactttaaccatagcattccctgagattttcgcttgtccaacttgaatatcgttacgaccagttaattcagcatttacgcctaaagattgtaatgcttgaacaattggttcagtgaatttttggaaattgtggaaactgttaccatcatcatctgttataaaactaaagtttaaattgccagtatcatgataaacagcgccaccaccagaaattcttctaactacatcgatgttatgagcatctatatatgtctgatttacttcctctatcgtattttgattctttccaacaatgatagatggtctatttatgtaaaataaaaagtaactttcttctgctggtaaattttttaaaacatattcttccattgctaagtttaaagttggatctgtaatattattattactaatgaatttcattacaatctctcccttatatctatatatattctctacttatttatgccttaactttgctcaaaatgccaattatatactcacaaatcattctaaatatcggcttaaagttacattttattatttttgattgttaatagtttatttgttaagtgaattttagtacaatataatttagttatgatttaaggaggacttaaaatgactgttgcagaagtgggtaacattgttgagtttatggatggattaagaggtcgtgttgaaaaaatcaacgataactctgttattgttgacttaacaattatggaaaattttaatgaccttgatttaccggaaaaaactgttatcaatcataaacgatataagattgttgaataagaaggtaagttataatgaataaaatctcgaaggctttaacttggtttattataagtttcattatatttcatctcatattatttattatgtggggcgaacaccaagaatactggtatttatatacaggtataatgctaattgctggtatcagttatgtattttatcaaagagatattgaatctaagcggttgcttacatcaattggtgttggtattattacggcaattattttaattatgcttcaacttttattctcacttataacttctaatttaagttatagttcattaattaaagaattagcaagaacaggtgtcaattggaagtggcaaatgttagtaactttactttttgtcattccatgtcacgagttatatatgagaactgttttacaaaaagaattaacacatttttcaataccgaaatggatagctatattaataactgcaatttgttctagttcattatttatttatttagataattggtggatagtaacatttatatttgttgcacaagtgatattatcattaagttatgagtatactcgacgcatagcaacaacatccgttgcgcaaattgttgctattatattgttattaatttttaatgcttaaataagcttttcttagacgtctgtgttctaagaaaagctttttgctttagaaaagcaatacgaagattcaaggcatgctttattatagtgtatacatttttaacggcaagcagttattattgaggttatattttagtcagtttttattactaaatattttataaaaatagtataatattttgtgggcaagttgaattgatggtggctatctgagtaaaggggggtggtacctatggcattacttaacacttttgaaaggaaaagcctattgtgatatctattgcaaacgcattacatttaatgttaagtttcggtatgtttatcgtcactttcattggtatagtagtagcaataataaatttaagcaataaaaaataaccatcatttcaaaactttgacatagaatgatggttaaagaaaatctcatttagtcaccgtctttttaacgggctcattaggcgacatgttcctgcatgtcgtctttttacatttttatagtaacatatcttttatttaattgtctatttttattagatgtgtaacaaaattttgaagtattttccgtatattgcctgctaaacatgtcagatttgaaaggaaaatcatactgtggtagaaatcaattatgattatatggtagtacttataaataagtgatttctattgaatatgtaatgaagttcatatattaatataactttcattgatatagaagtcgcaatgattaatttaaacaataaaaaacaaccatcatttcaaaactttgacaacgaatgatggttaaagaaaatctcatttagtcaccgtctttttaacgggttcaataggggacatgttcctgcatgtcgtctatttatgcactgcgcaatttaacaataatacaattatactttgatgtccatttaacataaagtggttgaaatttgtagcaaataaattaaccttgactattatcagaaaattctgtataaataacgaaaaagagatatggattaaatatgaagaggtgtttttatagaagaataaaatttttggcactatattatatttaactttagcacttggattatcaacagcagcttatgcatctacagaatacgcagaaggaggcacttggagtcacggtgtcggcagtaagtatgtttggtcttattattatcatggtcataaaggacatggtgcaacagctattggaaaatatagatcatttagtggttatacaagagctggtgtaaaagcaaaagcatcagctactaaacataattgctgggtcaatagagcgtattataacatttattaaatactaaaaaatcatagaaaataaacaacgcaagaggtacaacatgaaatggttcaaattaatacttgatgttacaaccttcattctgattgctatattgttatttgtttatacatataaagaaaacgaagaaatattgcctgatactaaataccctatagcggtaactgactggaataaaaaatatagtaaaaatgagatttataaacgtataaatcaattcgctaaaaatgagaacgtagcaatctataaatcaacttcaaattatacaaacaaaaacgtagataaagatatatatgtatttaataaatcaaaagcaacaactatcactccttttaacgctaaatataacattcattatttaagtgacgacgaattattaaaaaaagatatcaaaggaagttattttgtaaaagacaaaaattttgacgtgtctaaattcataaattttttaaaagaatatggtgttactgctgaatcatacaaaatagatcatatgatgattgccgttggtgtcattaaacaaatgaatatagaagttccgttatccgcacttttaatcgtttattttatttattatattttcgaaaagaacattaatttcaaagcgtatgcgattaagtatttaaatggttttacattaagaaaaataatttttgaaaatttttcaaaaaaatgcacgtattgggtaacgttaatcataagtcaaattcttttaactacaagtgtactttggatattaaattacacgggtaatttagatttattcatattaagattagttctgctttcatgtcttttcattttaacgattagtgttattaatttatggactttcttaatgttactaaatttaaatattgctaatatgattaaaggtaagcagcactttaaaacaattcgttttattaatacagtttgtaaaagtattctcttagtactaatagctagtgtaatgatagaaaatactagtgttattaaagatttgaataaaataaaggaaactgagaaatattggaatgtattagatgattattacacgattgaatttgcaccttatcacgaaacgaaacaaagtttgattgataatatgctgcgatcagaacaattagtaaaggctagtgaagcagaaaataatgcgattttattcaaaccaaagggtgactccgttgacaatgacaacttttcgcctgatgaggggaatgtaatattagtaaataatcagttctggtcgatttattacaagcagtttcaacctgatattccgataaaaaatcaaaaaaataatgtcgaagtaattattccacaaaagtttcatgcaatgcgtaatgaaatcaatcaagcatatcattcatggtttgaatttgtacaaaataaaaataataaagagaataagttatctatacagtttatcaacaaaaatgattatcgaattttttcatttgatgcacgagatagtcgccatttgtcatttatagaggcgccaatcattgtgaatgttcaggcatcagatttatcgaatgatttttattatgccatgatcagtcaaggcgggtatttattcaaaaattatgacgcgctagtaaaaaatattgaaaattatcatcttgatggggaaatcagtggaataaccaattataaagatagcgtgatggaaatgtatcatgaaaacaatttgaaattaacagtactcaacttttcacaaatcattatcgcaatcattttaataattattattttatttgatgtgaaatattattttgaacagcatcgaaaattactcgtaatcaaaaagctatatggttattcaacattaagagccaattaccaatacttattaataaataatatagttgttgtttttattggaatattgacgaatgtaattttacattctcagtatataatgatgatatttgcaacgattcttgtcgttcaaatattattgcagatttgcagcctatactatcatggccgacgttttaatgaagttatcaaggagttttaactatgaaatttatcattgcaatattattaggattaatcgtatccattactattgcttttacaatcatacatcatcctatacttgatcgttttaatcctttcttaaaaacggagtatagttatgccaaagtgccaaaaggtacgcaacaatatgttaatattacggcttatagtgaaagaggggaaaagcttgattataaattaacatttaatggattttcacctagtagaacgtatgtcgaaataaagcataaagggcaatatgtcatatcgatcacatatgttgaaaaagaggatataccaaaagaggtaagacaagaatgatagaattaaaagatttaaccatacaaaaaggtaatatacatattttgaagaaacttaatttgaaatttcaatgtggaaaatcatatgcacttattggtaaaagtggatgcggtaaatctacattattaaatactattgctggacttgaaaaaacggggaaacaatatgtctattttaatggtcaattagaacaatttaaatctaatttttacagagataaattaggatatttatttcaaaattatggattaatcgataatttgacagtaaatgaaaatttagatattggattagcatataaaaaaataagtaagaaagaaaaagaacaattaaagatacgttatatagaacagtttggtctgtcaaacagtttaaaaagaaaagttcatacgctaagtggaggtgaacaacaacgtgtcgctttaattagaatgatgttaaaagatccgattgttatgttagctgatgaaccaacgggtgcgttagatcctaaaacaggacagatgattattcaatcattatttgatttggtcgatgaaaataaagtgctgattttagcaacacatgatatggctattgcaaatcaatgtgacgaaataatagatttagaacagtatagtaaagtagcatctatgtgatatccaaaagataaaattaaaagccaatcaatgggaaatgttgacttcaacactccgtttgattggcttttataatgtgttactaagttatgaaagtaacaacggtaaactgaaaaaaagcaatataataatatttaatacgattagtaataaatgtaattgatttttcgttttaatatagcaaaaaacaatgactaaagataacaacaatatcatgattgcacctgggaagaaccataatgctgaagctgtgtaccaaatcattggtaacgccataataataaaagatataagacaagaaaggataccaataatattataagttctagtcaaaattacacctccaattttcattttaaaatgacatgcgtaaaacaatcattttaaatacatcatacaataaaattaaattgtgcggtagaagaatttgaaattaaattgaattggcttgattaaaaggtgattttatagaagttaataaaaatggttatttaatagaaaaacataatattaaagacatggctgataaaatactaaagcttgttaataatgatgttttagcagaggagtttggttcgaaagcgagagaaaacattatagaaaaatattcaacggaatcaatattagaaaaatggttaaatcttttcaatagctaaatgaaaaaatcctaggtattcatgagtacctaggatttttacgcatgatatatacaaaaaaagagaggatagtcctctcaaataatagttaataaaattgtagccatttcttccagctgtaactactaatacaagctaagttcattacgatatgtatgatttcaaattcataaccacttacatatcctcttgtaagtttaagtgtgaagattgagcctaacataacacaaatataaaaaacattaacataaggcgttaaaaagccgataataagtgctaaacctccaataacttcaccaattgacatcaatactgcgatggtaggtggtaaacctaaagagcctaagaagtgaattgttccatctaaatcaacaaatttcaaagtaccatgcactaagaatgatgttgctaacatccatctaattaaaagcatacctaatttcatcatgtcacctccaacattcatatttttaaaacatagtccaaattatatttgtaaacatgtggaaagtaaagattttttataagattaattattaaatatttattaaatattctattgtattgaacaattgttgtagaaagatgtttaagtcatcagttactttttgtatttataaataaagattagtacagcatagtgcaaagattatagggaaatgaattaactattgcatcgctatttatgaatcgtaaacactattatgaaattgcgagagtagtatggataattagaatgatggtttgagataaatgagtattattaaccagtgcgtcatcttcaaaattagaggccatttgctgtttataataagaagatttgataataaactatgataagaaaaaataatagcataccaaatatatcataaacaaattaaatgataaaataataatgcagttttctattaaagttgtttggaggtaaatatgtgaataggaatatcgttaaattagttgtgtttatgctaatcttagttgtagcagtagcgggttgtggtcaaaaagatactgaagagaaaactgaaatgacgacaataaaagatgaattaggaactgaaaaaattaagaaaaatcctaaacgtgttgttgtattagaatatagttttgctgattatttagcagcattagatatgaaacctgttggtattgcagatgatggcagcactaaaaatataacaaagtcagtaagagataagattggggcatatgaatcggttggatctagaccgcaaccgaatatggaagtgataagtaaattaaaaccggatttgatcattgcagatgttagcagacataagaaaatcaaatcagaattgagcaaaattgctccgacaatcatgttagttagcggtacgggagattataatgcaaatattgaagcatttaaaacagtcgctaaagcagtaggcaaagagaaagaaggcgagaagcgtctggaaaagcatgataaaatattagcggagattagaaagaaaattgaacagagtacgttaaaatctgcatttgcattcggtatctcaagagcaggtatgtttattaataatgaagatacatttatgggacaattcttaattaaaatgggtattcaacctgaagtcacaaaagacaaaactacgcatgttggtgaacgcaagggtggtccttatatatatttaaataatgaagaacttgccaatatcaatccaaaagttatgattttagccactgacggaaaaacggacaaaaatagaacgaaattcattgatcctgcagtttggaaatcattaaaagctgtgaaagataacaaagtttatgacgttgaccgaaataagtggttgaaatcaagggggattatcgcaagtgaaagtatggcagaagatttagaaaaaattgcagaaaaagcaaaataaaaatacagcgctactcgtaaatcatataagagtggcgctgtatttttaattatgtttattatctgtcggatgtgatgatttacctgaaagtttatttcgaataaatttaattacataaccgacaaggattgttttaacagttcttttaatgaattggcgcatcgttacatacctcatttctctatatcttacgaactatatacccattcatatatgctttttaaacgtcattgtcacaatttaatttttagggaatataatataaccatctttatctgcttttttagtaaaaatgacaaaaattgcatgtattattgagatgatggtagggatacctgtccagaaaaataataagtgaaaaagaccttgtccaaatttatcagcataaaatttatgaatacctaaacctccaagaaataatgcaacaataacataaatggctttattgactttcatttgtaaatcctccttaactataattctacttaaattcgttgtgaaaaccaatatttctaactttagaattttcaaactttctaaaattataagtatatctttttaaaataagctagaatttctatataataaatgttaataacgtaaaagggaatgatgacatagtgatacgtcaagcacgtccagaggaccgatttgatattgcgaagttagtttatatggtttgggatgatatggaattagaattggtaaagcatctacctaaagacatggtattagatgcaattgaaaaaagctgtgttgatgcaacatatcgaactttttatcagcatattttagtttatgaagtagaaaataaagtagcaggttgtattattagctatagtggtgaaaatgaattgaaatacgaaaaagcatgggaactacttgacttgccagaagaaataaaacaatatggcacgccattacctgtaaaagaagctaaagacgatgagtattatatagaaacaattgcgacatttgcagcatatagaggtagaggcatcgcgacaaagttattaacgtcattacttgaatcaaatacacatgttaaatggagtttgaattgcgatattaataatgaagcagcattaaagttatataaaaaagtaggctttatatctgatggacagattgaattatacaagcacatgtatcatcatttaattgttaaataaaaaaactcgacagttcgatgtaagtcgattgccgagtagtatcattttctattaaatgcctgcaaataatgcactaatataaatacctaatgcatataataaaccgaaaaatgtatttgttttaccagcagcagccattgctggcatcattgtaggcggtgtatcattcttcttgaaacgtctgataactttaacaggcattgggaatgataacaacgcaagtaagtaaaataatgagccaccaggtttaataatgatcgtaagtacaataaaggcataagcgataaagtacatgattgccataaatgttaaagaagcatttttacctaatagaatgggtaaagttttgcgaccacttgctttatctttgacacggtcgcgaatattgttagccatattaattaaaccgatagtgattactataggtacacttaaccaaattacataactttgaatattgccagtttgaataaagaatgcaataacgataataaacatacccataaatacgcctgagaataattcaccgaaaggcgtccatgaaatagggaaagggccacctgtatataggtaaccaacagccatacatactaatccaactggtaataaccaaaatgaagagttagcagctaaaaacaaacctaatattgctgctaagatgtaaaatgcaatggctaatcgtagcacaagctctgggctcataccgttgcgaacaatggcaccaccaatgcctacagattcatgatcatcaaggccttttttataatcatagtattcattaaacatattagttgctgcttgaataagtaagcatgctagtaacatggcaatgaataggctgattttaatatgatcttcgctaccaagaaaatatattttagatgctgctgtaccaactaaaacgggtactacggaagcagttaatgtatgaggacgcattaaatgccaatatttcttaactgtagaatattgctgatattgattactcattgaatacaaaacctctttaaatcatattttttataacaaagatattttaatagaaagtagcataaaggtcaattgacgtgaaaaattgcaagataagtttaagcaattcttgtaacacaattatccaaaaatgatacaatataataatgagtgaaaaaagacgaagaaagaagtgaaatggatggctacgggcgtattagaggacgatattgtcaaagagatatatggcagctcaaaggaatgggtttcagttgaagtgaaattatcacagtcactagacccgagcacattatttcatctcactgacaatgaggcaggagatcgcttttatatgcgtttgaatgataatcgaacgtcatattttggctacaaagcaattcaattattcaaaaataattctaaaaataaacaatctatttttaaagactgggaaaaattaaaacataacatcacatttatacatccgcaatctgagaaacatcatcttcgagttgttggagggtttcaattttcaagtcataaatcagatgatgaatggcgagagtttggactaaatcattttgtattacctgaagttttaatttcaactgataataatgggacatttttaacttatacagttaaaagggaaagttttactgttgaggcattgaacgatttaatggatttgttcaacaatatatcggatatagatgtggacgagcaaattggggaaattactagaaatgaagatatttataaagatgactggcgtcaacttgtagtagaagctatagaatctattaataatgaagaaaaaattgtactagcacgtagacggttaataaagttcgataaagatatcagtattccatatattctaaagcaagcatattctaaagaaaaaaacagttatatattcttgttagaatcacaagattctattttcttttcacaaacacctgaacaattaataaaggtcaataataaaatactatcgactaaagctgtagcaggtacaattaaacgttcacaagatgaggacgaagatacaaaaaatgttgaagcatttttaaaagataataaaaacttaatcgaacatcgatttgttgttgacagtattttacatgatattaaaccttatatcactgaattacattatgataagacgcctaaaattctaaaaaatgatcatttatatcacttgtacactgaaataaaggcgccactgaaggatgattcgtatattagtttaattgatcatttacatccaacacctgctttaggtggctatccaaaagaatttgcgatggattttattgaacagaaagaatttggtacacgaggattatatggtgcgccggttggctatatagatatatatgatgattgtgaatttattgttgcaattcgttcgatgcttattaagaaagcacaagcaactttatttgctgggtgtggcattgttaaagattctgatccagatagtgaattggcagaaacgaaccttaagttcacacctatgatgaatgcattaggagtcgatatgaatgggaaatcataaagcagctttaacgaagcaagtttttacatttgcatctgagttatatgcatacggcgtaagggaagtagttatcagtccgggatcacgctcaacgccacttgcacttgcatttgaagcacatccaaatattaaaacatggatacaccccgatgagcgaagtgcagcattttttgcagttgggttaattaaaggcagtgaaagacctgtcgctatattatgtacgtcaggtacagcagcagcgaattatacgcctgcaattgctgaaagccaaattagtagaattccattaatcgttttaacaagtgaccgtccgcatgaattaagaagtgtaggcgcaccacaagcgattaatcaagtaaatatgtttaataattatgtaagttatgagttcgatatgcctattgcggatgatagtaaagagaccattaatgcaatttattatcaaatgcaaattgctagtcaatatttatatggaccacataaagggccaattcattttaacttgccatttagagatccgttaacacctgatttgaatgcaacagaattgttaacttctgagatgaagattttaccgcactatcaaaaaagtatagatgcatcggcattaagacacattttaaataagaaaaaaggtttaattattgtaggggatatgcagcaccaagaagttgatcaaatactaacgtattcaacgatatatgatttgcctattttagctgatcctttaagtcatttaagaaaatttgatcatccgaatgttatctgtacatatgatttgctgtttagaagcggcttagacttaaatgtggatttcgtaattcgtgttgggaaaccagtgatttctaaaaagttgaatcaatggttaaagaaaactgatgcatttcaaatattagtgcaaaacaatgataagattgatgtctttcctatagcgccagatatttcatatgagatttctgcaaatgatttctttagatcattaatggaagacacgaccatcaatcgcgtaagttggttagaaaaatggcaatgcttagagaaaaaagggcgtaaagaaattaaatgttatttggaacaagctacagatgagagtgcattcgttggtgaattgattaagaaaacatctgaaaaagatgcattatttattagtaatagtatgcctatcagagatgtagataacttgttattgaataaaaatatagatgtctatgcgaatcgtggtgcgaatggtattgatggtatcgtttcaactgcactgggtatggctgtgcataaacgaataacattattgataggtgatttgtcattttatcatgatatgaatggactattaatgtcaaaattaaataatattcagatgaatattgtattattgaacaacgatggtggcggtattttttcatatttaccacaaaaagaaagtgcaactgactattttgaacggttgtttggcacaccgacgggattggatttcgagtatacagctaagttatatcaattcgattttaaacgttttaacagtgtttcagaatttaaaaatgccacattgttatctgaaacttcgacgatttatgaattgataacgaatcgcgaagataactttaaacagcatcaaattttatatcagaaattgagtgaaatgattcatgacacattataaatactatgaagcaaacgttgagaccaatcaagttttagtattactgcatggttttcttagcgacagtcgtacttattataatcacatcgataaatatactgatatctgtcatgtcatcactatagacttaccaggccatggcgaagatcagtcttcaatggatgaaacgtggaattttgattatattacgacgttgttagaccgaattttagataaatataaagataaatcaataacattgtttggatattcaatgggtgggcgtgttgcattatattatgcaattaatggtcacatccctatatctaatttgatattagaaagtacgtcaccaggtattaaagaagaagcaaatcaattggaacgccgtcttgttgatgatgcacgtgctaaagtattagacatagcaggtattgaattatttgttaatgattgggaaaagttgccattatttcaatcgcaactagaattaccagttgaaatacaacatcaaataagactacaacgattgtctcaatcgccacagaaaatggccaaagcattaagagattatggtacaggtcaaatgccaaacttatggccgcgcctgaaagaaattaaagtaccaacattaatattagctggagaatatgatgaaaaatttgtacagattgcgaaaaaaatggcaaatttaattcctaatagtaaatgtaaattaatttctgctacaggtcatacaattcatgtggaagatagtgatgaatttgatacaatgatattaggatttttaaaggaggagcaaaatgactaacagacaatgggaaacacttagagaatatgatgaaatcaaatatgaattttacgaagggattgctaaggtaacaataaatcgccctgaagtacgcaatgcgtttacacctaaaacagttgctgaaatgattgacgcattttcacgtgcacgtgatgatcaaaacgtttcagttatcgtattaactggtgaaggtgatttagcattctgttctggtggtgaccagaagaaacgtggacatggtggttatgtaggtgaagaccaaatccctcgcttaaatgtattagatttacagcgtttaattcgtattattccaaaaccggttatcgcgatggtaaaaggttatgctgtaggtggcggtaatgtactaaatgttgtttgtgacttaacgattgctgctgataatgctatttttggacaaactggtcctaaagtaggttcatttgatgcaggttatggttcaggatatttagcacgtatcgttggacataagaaagcacgtgaaatctggtacttatgtcgtcaatacaatgcacaagaagctttagatatgggcctagtaaatacagtggtacctttagataaagttgaagatgaaactgtgcaatggtgtaaagagattatgaaacactcaccaacagctttacgattccttaaagcagctatgaatgctgacacagatggtttagctggtttacaacaaatggctggggatgcaacattgctttattacacaactgatgaagcgaaagaaggccgtgatgcgtttaaagaaaaacgtgatcctgacttcgatcaattccctaaattcccataagttattttgaatatgatattaagtcacttgcgtcgtttattagcgacgataggtggcttttttattttataagaatttaaaagagaattttaattaattatcataaagataagatggtttgagtaaattaatagagaaagaataaatgttaaagattattattacaatgaaaaaacgagctggtgagaaattgaattctcgccaacccgctttatgaagtgaaatcatttaaattagttatactaagcgctcataaacgattgggcgcgaagtgccaataccttgtttggatgacgtttgcatgaggatatgctgtgtatcatcataatcaagaatataagtgatttcttcattatcaatagatgaaaatttaatgcgttgatgtgccgtatctataaaaagaatatgatattgattgtgacttgtatcatcgccatgacgtatacaaattgatttttgtaattgatgattactccaattaccaatgaataaattgatattggtttgttctagatgtgtgagtttggttgtgtcgtaaactaaatttataaattgtagttgatacatagttttacctgcctttaatcaatatctatattactttttagtaacctatcattgaaccataccagttataatcacgattgaatgataaatgtaataggcttgaatctgcatcttggattgataattctgtatcccaaggattccagtaaataagtttttcttggtcattaattttagcattaccaacaactgctagggcatgtcctaaatgtggatcattagggttttgagatacactttgtgcaagaatcataattcctacattatcttttgtaagttgatcaacttgttcatatgatggtacgccttcttgataatgaatatctctgccttgtgatttaccgtattcaatcatttgattagggaatgttgagcaattaggaaggtcttgctcacttacttcagggtataatgtacgcataatatcatgtgcattataagtgtctgtatttttagttgcatttaataatgctgccatactaaatcctgcacaccatgagttatcgaattgttgttctctaattttgaagttttttaatgtattttcatattgaacttgatcttcttgtatcgcttcgttttcttcaactttagtaggtgttactgtattttttaactcttgtttcaattttgctgaaactgttttagcactttctttttcttttacattaccaggtagtggcgtagcttttactaatctaactttgccatcttcttcaaaataaaaccctttttcatcagtaagaacagtgatatttgaatttttatctttaatttggtctaaatctttagcgatgaagtttgaaattttaacactgtaattcatgtcttcttttgatttgtttaaatcatctttatttttagggctaagtgttaaagtataaacaattttaccgtcttttataactggataatagtaactattatcttcttcaccattaaatttataaattttaaaagcttcgccaagttcatatttaccagtttttgcattactttgtttatctaatgctttagcataaccagcaaattgttgttgtgctagatcttttactttttgaggtactttgtcactcttaacattaatttctagctgtttagagtgtgaatcggctttggctttattgttattagcaaatgcgcctagtgataaaataagcattgaaaccattatgatgcttataatattgaatactctagatttatatgaactattcatataataccctccatttaaatcaaaatattttgcgttgctaagactttgcttctatttactaaatctaaattaagatgaagtttatgcagcgtcagggttgtctgaattattgttatcgccattgtctggattatcagggttgttagggttgtcagggttatttggttcatctgggttgttagggttatcaggattgttagggttatcaggattatctgggttattaggttggtcatcgttggcaaaatggatatcttcaatattttgttttaagaagttgcgtacattttcattaataaataccgcaccattaaattcatttggtacaccgccccaatgaattccgatcacttcatttttttcattaaatacaggtgaacctgagttaccaccagttgtacttaaatcatattgcatagcttcgcctttgaggtaagtgatttttcctttactttcccacattgttgctacaggtttatcaccaggatatcctgttacagtaatattttggttaacttgtgtttcagcattattactcattgttgctggtttaactacttcaccaatatgtttgttttgctcattaggggagaatttaactattgctaaatcaccttcgcctgaatatttagtgatttgttcagcagtgaaaccaccatttggataattgtcttggttaattgcagaagggaatgcttttaaagcatgaggatcaccgtgcgtagcatctacgacgtgtttatttgttaaaagagtatctttacctacaactacaccggaagcaataaatgtaccagtaggtgcttcaacttgaatataagttacgggtgcataatgaccattcgttgtatctgtgatttggtgacgatcgttattcggtaatataacatttgcgtgttcacgttgttctaatggtttaaggttaccgccttttttaatcttaggtgtttgctgtttgcttgactgcgtttgttgtggatgattgtccatagcttttgatgataacgcgtttgctgctggagaactcacaagtgtcgctgttgtcaaagttgcaacgaataaagaactaacttttaaaaatttacctttcatctaaaaacctccaaaaaatttatttacaagttaaatataacactaaaaatttttaagtcaataagaatatataaataaattaaaaagtttttgtaaagattagagtttacaaaaacattaaggtaattaaaattgaattgtattatactttattcaattgagttaaattgataagatcgtcaattgtttgcatttatctaaaagaataaataagaaaggaattgagagcgaatggaaagtatttgtttataataataaatagtaacttttgaataataattgtttggccaaaggtagattaatatgaatggtgatatattatttgagtgcttaagtttcgaagaacaattataagttagcatattaaaaccttttgatagaatcattttgagtgaggtgtttaaaggagaggaatataactcggtagtatttacagtctctatagagtattatttaaaacttatagaatataaaaaactgaacgtactatgaatttagttcacgacgtccagttcaacatatcatttttatttagtatttaaatatttagcaagtctcttcataccttcttttaaaacatccatttcataagcataggaaatccttacaaatcctttaccgaattctgtaaaggatgagcctggaacgattgctaaatgtgttgattcaagtaaatcgacacaaaattcgaaatcgtcatcggtgatatgtttaatacttgggaaaatataaaacgcgccttcaggttgagcggtaatctcaaaacctaatttagttaattcagatactaaataatttcttcgttctacataagcttcgttcatatatttaggagcttctaatccttcgttaagtgctgttatacatgctatttgagctggaacattggcacaaatacaattataggcgtgcataaatgttaatttatcaatcaaatattgaggccctaatagaaaaccaattcttattccggttgctgagtgtgatttacttaaaccaccaattaatattaattgatcacgaatgtcttcaaattcagcgaaggatacatgtttaccactaaatgtattttcagcataaatctcatcgctaataataaatatcggatatttttttaatacatttacgatatttaaaacttcatttctttttaaaactacgccagttggattagtcggataatttaacaagacagcttttgtctttggagaaatatgactttctaatgcatcaggtgtaattttgaattgtgttgctgttgtatcaatataaattggtttaccacctagtacttcgatgagtggtatgtagcctgcataaattggtcccggtattataatttcatctccaggctctatgatagaacgtaacgttgtgtctattgcttcacttgctccatttgtcacaataatttcttcaggatcataggaaaaatgataacgatttttgaagtattgactaattgcttcgcgagtttctaataaccctttattgtgagagtatgatgtcttgtcattgttaatagcatcaatatatgcctttttcacaacatcaggcatcgggaagtctggttggccaatagttaaattaacacaatcatccaaattattcatacgatttgaaaattggcgaatacttggtgctcttaaatatttagaattagaatttaaagaaagtttcatttgtgacacctcaaatataaatcaaatattgtctaaaaatttagaaattaataatatcataacatacttttaaaccaaaaaagggtaaattacttaagctttatttgaaaaacgaaaaatgtctaaatacactgtagtaactacttttcaaaatgaataaagtggttacagttaatgtacttagacactataaaattatgaatctttaaactgtgatggtctttgtaaattaattattggatttgtccatttacaaacaaagtttgtagataatacatatacgatgattacagatatacttattaaataaagataagtcattaatgatataggattatcgaatgggtaccattcaaatcctctaacaatgccaataattaaaccatgtaataaatatacgtatagcgtacgactaccaatataagtatataattttttctttgttgacattaaatttagaaacgcagtcattgcgattaatataattccatataatataagtcgtttaaaaggactgaatatactctgtccttcattttcaagtgaagtatatggtgaacttcccaataaccaatctgcattgataggatgaatcacgtaaatgataaaaaacaaaataaaggtaatgatagatactggtattagttttttatttttaaaaatagccgtatgttttttggtgaaaatgtaacctaggtaaaatattgggaaaaatacgattgtccttgaaatgctcaagtagctatcgatgttatctgaaaaacctgctccaatagatataataattgaaactgatagcactttatatggattaaatcttctaactattactaaaatgacatgaaagaaaaatagcgtgatcaaaaaccataacgcaaatactgggttaaaaggatcaagttgtaattcgtcacttttacctgttaagaaataatatattgaaaagaatgcaaaaaatatcatataaggtactatcaaacgttttgaaattttttctaaatagtatggtttatcaatatttttcgcgaaataaccagatataaacaaaaatgttggcatatggaaactataaataactaggtataatgctgataaatatttatcgccactagtgtagggttgtaacatatgtccaaatacgactaataatattaaaattgctcttgcgttgtcaaaaaaataatctctctcttttaatgaagtcatattttatctcctttatgtccataagactcttactaatttattatattttgtattagttatgcaacaaatttgtctattgtgtcgaatagtattgtaaaaattataaaaaaagcatataatattataaataatatgtagtggagtagatcaacatgtataaacaacttgaaaaacttattacactgactaacaatgacttaaacttagtgaatagaagatttggacaacgcacggatatcacatctgaacagctagaacttctccgtattttatttaattacgatcgcttatcacagtatgatttgacgatgaagattagcagggaacaatctatagtttcaaggtggattaagaaattagttttgaaaggttacatcacaagtcaacaatctagcgaagatttaagatgtaaagaattaattttgactgatcaagcacgtacattaatttcacaaataaataatgcacgttgcgaattgattgaagcaagatgtcaatgtttatcggaagtcgaattagacaatttaaatcaattacttgataagttaaatcaacgacgcatatcgttgtaacacgacaatagcaaacacataatttagtgtcattgtgcacacaacaaaaattgaatcatgaattacaagcaaaagtagcggtgattgttaaaattgatggtaaacaatcaccgctatttttgcttgtgtatgtataaaaaagggatcaaaggtcatcccccatgattgatagtgggggatgacttttgatcctatgttcatgttgcttatttatattgtgggatgtcgaagtatttgccgacttcgccaattttatcatagtagcctttgatgattttagcattgatgttagcccaatctacatctgtagcatattggtgtgttcctggatgtgcaggattccatctcattttgtaaagtgtattttgaccagcttttacatatgagttgccgatgaatttagcaccaccaacgattgcttttgatactgtgtcccaaccagcttgtttagcatatttaataccttcacgtaaaggatcgttatcatatgcagcaataccaaatacgttatggtatttcgtgtttgagttagttacaactttgttgttcactacatctgcacctttcgctaattgagaagtaccgttacctgtttctaatagggcatgtgagataagataaacttcattaatgccatacatttgagcagctttgttaaatgcagcaccttggttttctaatacacctttaccttttaagaattgattaattttatcaatagaaatattttgtggttggtctaagcgtaagaattgatattttaatgctggatcttgagctaaacgcttcgtatccattgcatgcttaacatcattaaagttagcatctgtccacttacctggtacacgttgtacttgtggtttatattgtaaaccagcttgtatttgagcaacttggtttaatgtcatacctgtttgattatacttaattaattctttagctaaatcagttgatttaatccatgctaatttaccgttagataatttaccatagtaccaagtttgtccattaatgacttgttctttaacaactgcgaatggttgttcattaaatgcttttaatgagtatttagctgtatcagaatttggtgttacatagtaataaccattaccatttttaattacataagtgtagttataatctttggcagctgatgtagttggtttcacagcagttggtgcagttaaatcttttgcatttacccaaccagtgcggttattaatagtaccgtataaataaacatctttgcctacagatacttgtttcgttgcattaaatgtaccttgagcaatgttattgcctgttaaaatgacttggtttttagtaccccaaggaaccattgataagccgttatttgatttattaacagtatatttttgagtcgttttaacttctttgcctaggttttgaacatttaagtcttttacattgaaccaacctaatgggatgttatggcttgtattgtttaataatacatacgtttcattaccatgagcacgctcttttgttacatagaacgtacggtctgcatatttcgcaccgtttttcgctgttttttcataaacagaagcacgaataccagtgttgtttggtttaacttgagcaatcttgctaactgtttgagtcgtttgtggtttagtaacagtataagcttttacagctgtttttggttgtgctactgcttttttaggtgcagcaggtacagctaaatatgctttacttacccaaccagatttaccatttacagttccaaataaatagatagatttatcaatttgttgttgcttagtcgctttaaaagtttggttacctgtaccagaaactgcaccagcttcttgtttataagtgccccaaggtactgaatataatttagtgcctggttttactgtatatgtttgcattacatttacaggtgattttgcattgttataaataacgtcaccttgtttaacccaaccaattaaagttggactattgtaatctttaactaagtagaatttgtttccacctaaacttgcttcttttgttacagcaaatgttttttgaacttctttcgttggcttaccagttttgtcataaactgtagtgaataagccattgtttttagcattaatttgagcaacaccgtttaatgatgaaactgttaatttattatttgttgtaggtgttgatggcttaggtattggtgtaggcgtaggtttagcagtatcaactaaatatgctttacttacccaaccagatttaccattcacagagccatataaataaattgatttatcaatttgttgttgctttgaagccttaaatgtttggtttccagagccagacacgctaccagcaacttgtttagatgtaccccaaggtactgtataaagtttcgtaccagatttgattgaatatgattgatttacatttacaggtgatttagctgtgttgtaaaccacatcgccttctttaacccaaccaaatttattaccagaattgtaatcttgaacaagatagaatttttgattacctaatgtagctgttttagatacagcaaatgttttttgaacttcattagttgctttaccagttttgtcgtaaacagtagtatataaaccactatttgttggtttgatttgtgcgacaccattgtttgctgcaactgttaatttaccagttgatggtttcgacggtgttgttggttttgatggtgtagtaggggtagttgtaaattgcgtaccccatggcgccactttacccatttttattaaatatttttcattaattaagtcatataattgatcataactataattatgacttcttaaatatccatgtggatcggcatggtccgtaccacctaaatatttacttacagcgtagtgagtccatactgtaccatttccatcatactcagcactgtctggttttaaaccataatattgtaattgtgtagctgcatagtcagcatagttattcattgaacgtgcaaatgaagcatagtcgtgtgtgtgtacgatttcaacattgatgaatctagggttaccgactgcaccgacaccccaagataagtaatccgttggtgctgtttcgattatacgatccccatcaacaaatgcatgtacgaatgcgttttgatagttatttttcatataactaatttcaccatttatcgtcgaacgatcattagctgtatcatgaactacgataccttcaggacgacctacgccgttacggtatgcgtatttagggaagtaagatgtataatcttcttcaattttaggtgcttttaagttatttttacgaatgtaatcgttaattgaagagtttacttgtggtttatattttggcaaactcgtttttggtgttgcagcaactgatcttggttgtgctgaagcgctaaaagtagttactttaggtgtcgcttcagttttagctttaggtgctgcggctttatattgcgtttcaagagctgcaggtttagcagctgatttaattaattctggattaatttgatgttctgaattatcatcttcatcatcaactaaactataaccagcatttgtaacattagtgttagttttaggtgctgtagtgcttgttgactttgcaacaggctgcgtattatttgtagtcgctgattgattagcacgagtgtcaccatttacttgtgcagtatcaactttttgacttacttgagcattgcctgttttgttatttgctgtttttggttggacaatagcagggtcttgatatacttgagtgccagaaatgttttgcgttggattttttacctcagcttttgcttgttcagtagttgctttaactttattactatctaaaacatttttattagtagtttgatcttgtgtcgtctcagctgcttgaacttgatgtgcagtgactgctgaacctacaagcgttaatgcaaccattgatggtagtttgtaattgaattttttcgccattctatttattactcctaacatttattaattattactaacattatagtacctgttttatatacctgtgcgtatttaaccaatttgtaatatactcttaatttacattttcactgtaaaaaaatgaaaaaaattttgaatctcaatggtgacgtgacaaatcaaatagaattgatgtcaatttaagaattggtttattacaaatgtttctaaaatagatacaactttttttaattaagcgaggttaacttttttgtcatttcaatatgctcgatgccttcctcaagaaatatattacctctcattttaaagtttaaactttcataaaatgggatagcatgacattgggcattcatagtagctacgtaaaaaccttcatctttagctaatgattctacagcttgcataagcattctacccattccttgtccacgatgtgatttcatcacagctactcgttctattttgacagttgtttcattaatagggcgtattcgagcagtggcaactggctgtccattatcatatccaatgaggtgaatagattcagattcatattcatcaatttcactttcctcagggacgccttgttcttctacaaacactttctttcttatatagaagcaatcttctaacatcttttgattgtttacttttgaaaacataaaattcctccacatcctaacaaaatcatttacatttaatttactaataataacatagaataacgattgttattttcctcaaaaataattagacataaaaaagctataaagatgattcacaagaatcatctttatagctaattaattattaatgttatagtgcttcttttctaataattgctgtatattgccaaaagattcgcatttgagcaatattccaattattcattcccattgtaaatcctgaaggcttaaatatattcacatcagttacttctaatgctgctgcaactaaatattgtaatggaatgcttagtgatttcattgtttcggtaatgccattttcatcatatacccatgaaaatggtaactctgattcgaaaacatcaacactattgaaaatttcaggtagggctaaaatataacatgcaccatctacaataggattgtcgatactatttttgtaataaattaggagtgcttcatagttttctcgatgctcatgattgacgtaaaaaaattcacttctaaaatgagccatatcttggctatgaatgatttgttgttctaacatattaaacatgccatttatatttgcaatcttttcgtatgtttttctactcatgtatgatgctcctttcataaatagtaaatgttaatcgtcatataatattaatttacaacaccattttggttatttgaagcttgtggcgcttgttgtgtgccaccttgattttgatttaagttttgatctgtagcaggttgttgttgattgctggaatcactgttattagttgaatcattgttctcgttagatgtcttatctttatctgtcgtatcattttgttcttttctcaataaactactatctaaaggcgttaacggtattaatgaaccataatgattaatgacacgttgatctaagaaatcatttttatcattaataggtgataattctaagtctttacgaagtaagtttgcatatttttgaatgctttcaacacttggatgataatagtaaataccatttaacatatcatctttaccttttaattgcgcagttttaatttcaacatcatttgttaagtacatttttgctaaagctttaatttcagagttagttaaattatgctttgcatttttgcctacaatttgaatcacgttatcaagtttatcaatagaatcaacttcctgtgctttttggaataaaatcttaattaattccatttgacgttgtccacgttttaagtctgaatcatgatgtctagttctagcaactgctaaagcctcatcaccatttaatttttggtacccttttttaattttaatcttaccagtatcatctgtgttaggttcatttaagtcgtatggcacatcatagtatatgccaccaagctcatttacagcctcgacaaatgctttcatattgactctcacataataatcaacaggtacattcatggtagcttctaccgaatccattgcggcaattggaccaccatatgcatgtgcatgggtaatcttatcgtaatagccaactttaggaatgtagctgatagtatcacgtggaatactaagcattctaatttgatgttttgattgattaaaagtagttaaaatcatagcgtctgatctagagtgttcagcatcctgtcctttttttcttcttccatcgttatcatcgatacctaagaaaagaatagagataggttgttcttcgggattgactttattatctcttaagttggattgacgattagcatttttgctgtcttgagaagattcgaatgcatcttgggacgttttaaaaagtaacgtagcgaagactattggaacaacaatgagaaccaatgctagaaggatcaaaaagtattttaaaaatttattcatgattgatgctcctatattaaatttttgttaaatcataatcataattttaaaatataattagttgaacgatatttatacaacttcattactaatacattatagccttaaattgtagtactttatagtaaaaaatacaaatgttatgtcaaagttccttgtaatttgaatgttttgttaaaatcaaaaagcatttttaaaaatataatgcgactttagtatgatgtcttaaaaaatttaaaggcgtaatataaattcgagtgatttatacaaagtgataaggtataattaattttgttgtatagataacatattagaaaaacttattactatgtagcgtaaagcataaatgaatgataagttaatttttgtaagttgtattattaggcatctaggttcaaatttttaacgatttaaatatataaaatgaatacattgtgaggcaattatcaaatgaaatttaataaagtaaaactagttatacatgcgtgtgtactattatttatcattatttctatagcgttaatttttcatcgattacagacgaagacacattctatagacccaatacataaggaaacaaaattatcagacaatgaaaaatatttagtggatcgtaataaggaaaaggttgcgccgtctaaactaaaagaggtatataatagcaaggatcctaaatataagaaaattgacaagtatttacaaagttcattatttaacggttcagtagctatatatgaaaatggcaaattgaaaatgagtaaaggttatggatatcaagattttgaaaaaggtattaaaaacacaccgaatacgatgtttttaataggttcagctcaaaaattttcaacagggttactgttaaaacagttagaagaagaacataaaataaatatcaatgatccagtaagtaaataccttccatggtttaaaacatctaagcctatcccattgaaagatttaatgttgcatcaaagtggattatataaatataaatcctcaaaagattataaaaatttagatcaagcagttaaagcgattcaaaaacgtggtattgatcctaagaaatacaaaaagcatatgtataacgatgggaattatttagtacttgcgaaagttattgaagaagttacaggtaaatcttatgctgagaattattatacaaaaataggagatcctttaaaacttcagcacacagcattttatgatgaacaaccttttaaaaaatatctagcaaaaggttatgcttataatagtacaggactttcattcttaagatctaatattttggaccaatactatggtgcaggtaatttatatatgacaccaacagatatgggtaaattaattactcaaatacaacaatataaattattcagtcctaaaataaccaatccattattacatgagtttggtacgaaacagtatccagatgaatatcgatatggtttctatgctaagccaacattgaatagacttaacgggggattctttggacaagtctttactgtttactataatgataagtatgtagttgtacttgcattaaatgtaaaaggaaacaatgaagttcgaatcaaacatatttataatgatattttaaaacaaaataaaccttacaatacgaagggtgttattgttcaataattaatatagaagatataacatgtatatggcattaaggcatcgaccttatctgaccagtatacgagttatatctttttttttatagtggtaaaaagtttaaagtataaggttgaagaaggatgagtttaaaaatatgtgttaactgataaaaggggaaatcatttggtgagttggcatcagactaaaatgaatgaagacgaatacgttggtccatgcgtggtgtgaatgttttctaaatctaactggaaatgataatttaataatgtacacttttgattgtttaaacatgtacaatttttaaaaacctagggataattttattgacgtgaacaacattgagattatctttagacataaatatggattttgaagttactatatttattagttgtggttgttaatgtattaattgaattgattataatgattgtcttataagatatagaaggggacttaaccatttaaaaattgaaggaaaataaaaaccagctaacaaaagtgttagctggttaaactttacattattaaaatgttgtttataagtgtgaagagtgaccgccttgcataacccaatatgttccgacaacgaaacaaagtgtaattacaagagcaaagataactttgaatgtttgtaaacgtccatctttaccttcagttaaatgcatgaacattaataattgaagtcctgcttggacgaatgcaaagccaaagataattgtcaacttcgcgtggaatgttaatgacgtgtatagtgttacgtaaactgctaaaagcgttaatacgatagatgcgataaatcctacagtatgtttcattattgtactcatccgctatacaccatccctatcatatatacggcagtaaagatgaaaacccaaacaacatctaagaagtgccagtataaacttactataaataattttggcgcattatatttgtctaatccgcgtcgttggatttggattaataaacaaatggcccaaacgatacctagcgatacgtgacaaccatgcgttcctaataggataaagaaactagaccagtaagaaccaattgttgggttaacgccttctgatgcatagtgtgcgaattcataaatttcgaatccaacaaagactaaacctaaaagtaacgtaatgatcatccaaaacatcattaacttttgtttttcttggcgcatgtagtaaatagcaataccacatgtgtaagaactgaataataatgcaaacgtcattattaaaacaagaggcaattcaaataactcagtagtcattttacctgcataatcgccaccatgttgcaaagttaatagtgtcgcaaatagggtaccgaataacgcaaattcggctgtaatgaaaatccaaaagccaagcttatttaattcgccttcatgtgtgcgtgaatcaatagtgtttgtatcatgactcatgacttacagcctccctttctttaatacgcgcttctcttaatctagcttcagtttcagcaacttcagcagcagggatatgatatccgtgatcgatttggaaactgcgataaatcatagtaccaaaaataccgaataaacaaattaatgctggaattacagtttcgaaaattaagaagaaaccgccgatagtcataaagataccaatccagaatccaacaggagtattgtttggcatatgaatgtctttgtaattatggttgtctaagtaatgacgaccatgttctttcatatcaacaaatgtgtcgtagtcattccaatctggtgtaatggcaaagttgtatttaggtggaattgctgatgcagtagtccactctagagtacggccaaggccatcccagttatctccagttgcttcacgtggagatttgaagtgactgtatacgatactaacaacaaggaataagaatccgattgccattaataatgcaccgatagttgaaattaagtttaataagaaccaaccatctgatggcatataagtgtataaacgacgtggcataccatctaatccaagaatgaattgtggtaagaaacaaacgttaaatccgatcatgaagaaccagaagcaccatttgtttaatgtttcgtttaatttgtaacccatcatctttggataccagaagattaaaccagctaagcaggcaaatacaacaccagtaaccaatgtatagtggaagtgagctactaagaagtacgtattgtgatattgatagtcagctgatgccattgctaacattacacccgtaacaccacctaaaaggaagttagggataaatgctaatgagaatagcattggtgactcaaatgtaatacgtcctttatataatgttaataaccagttaaacaatttcacaccagttggaataccaatcagcattgttgaaattgagaagaatgagttgattaacgcaccattacccattgtgaagaaatggtgaacccaaactaagaaactaaggaacgcgataccggcagttgcccataccatactttgatgtccgaataaacgcttacgagcgaatgtcgggataatttctgagtaaataccaaatgctggaaggataacgatataaacttcagggtgcccccatacccagaagaagttagcccaaagcattggcataccgccatgtgcaactgtgaagaatgctgtgtcaaatattctatcagttgtcattaatgctaacgctactgttaaaggagggaaagcaagaataacaattaatgtagtaataaatgttgttactgtaaacattggcatttgcataaacttcatagttggtgttttacatcttaaaattgttacaaagaagttgatacctgtagctaaggtaccaagccctgaaatttgtatagctattaagtaatagttaacacccggaccaggactgaattcacctgctagtggcgcatagtttgtccaaccagctgctggtgaaccaccaataataaatgacaggttgaataaaatcatacctgcaaagaatagccagaaacttacgttgtttaatactgggaatgcaacatcacgtgctccaatttgtaatggaacaacgatattccataaaccaaagataaatggcattgccatgaagataatcatgattacaccatgtgtactaaaaatttcgttatagtggttagattctaaaaatttgttatcaggtactgttaattgcgcacgaataagtaacgcatcaataccaccacggacgaacattaatacggcacagattaaatacataataccgattttcttatggtctacagatgtgaaccattctttgtaaagatatttccataatttaaagtaagtaattactgcgattaaaccaataactaagaatggggcaccaatttgtgccattgtaatcatccagttacctttaactagtaattgatcccatggaaaattcattaatgtccacctccatgatcatcattgtcttgatcttgcgcatcttttgaaattttcttcatttctttcgcatttttcgattcatctttcttgaactcattgttatatggttcgtcatttccaagaatcatcaacttcataccatgtcgtttatagttcgcatttgtaatttgagctttacgagcaggtattaatggtttgtctgatacatctttaaacatattttcttcactagtgaagtttggatctttcaattcgaaattgaaacgtttatatgcatagaagatgtattctggatcggctgctggatcaacaaacgccatatgtgtaccattaaattctaaagctttattaggtgtgcttggtaataattgtttatcaaatgtatcttgatctaacgttttcttacctttaacttctttcacccatttgtcgtagtctttttgactaacggcatttactttaaatgtttgacgtgagaatccttcaccattgaagttagagttacgacctctgaacgtaccagtttgagatgcttctaacgtccaattcattgtcatgccagtcatggcatatttttgaccacctaattgtggaatccagaaacttgtcattgtatccatagcttgaagcttaaatacgacaggacgatctttagggattgttaatgtattaacagtctctatatgttcatctggataagcaaagaaccatttgtatcctgcacttactgcatatacaaccattggatctttctcactcttcggtggtttttcgtaatcgtataaagttttaactgtaggaatagctaaagcagcaacgattatgataggtattacaaaccatattgtttcaatgatggcattatggtgcatcttaccagattcggcattcttattataactatacttgtaaataaaaatggcgaacatgccaagtacaacgaaacaaataacaagcatgaagacgattgaataaagaatcaagaacttctgactacttgctactggcccttttgcgttgaaaatttctatatttgaacaaccactaagtaaaattagtgtgccaaataatagaagcaaagacttaaattttgacacttttttgacctcctaatactacaaatgtagggcttaacattaattttaagttattacacaatatttacaagggcttatgggaaaaaaattaataaaattgtatcaaaaatgttgataaatcaaggtgtgacgtgggttcacacatttgttaaaattatgtgtacattttgtgactaatagcgtttttgaaaaaattgcttcatatttaaaaggaaagttgagaatagctttcaattaaaggttaattgaatgaaaataaaaaaagtttgaaattgtctaataaattgaaaatgatggctagttcattgaaaggaagcgcaaacactttaaaaaggaatttgccaaaagtaatttatcgttaaacaatgaaaagtggaaatttgtttgttcaaaatcaaaacattttttaaaaagagcagttaagttttaataatttgataggtagtcctttggtatacagaaaaaatacaatatttaggttaaagttgcagatgaagttggaataacaaataaaatggtagcaaaacatgttcgtttgctaccattttatttacagtatagtgatgagggctatttaacctcaatatacctagtggaaattttaattgcaccatctgaatcagtgacatgatatttaatttgatatttaccagatttagatgtatcaatttggccatcgactttaattttatcggttaaatctccatcttctttatcaaatgcacttatgccgtttagaaggttataatcttgacctttcttaataacgatatcattagcgcctttaatttgtggtgtagtattcgtcgttgcatctgcatttaaatttggtgttactagtgtagcagaaacaccgagggctgataatgactgtaatagtttattcataatgtaacctccgaatgataagtcatttctgagttagctttactataccttaatttatattatttacacatcatactatagtcctaatcttaccctataaagaatgaaatttaaatataaatttataaataatgaggaaataattattattttgaaaatctgccacaattgtaaaattaataatttagggataatttgaaatcaaatataactttattcgacagtttgaacttaaatttttgtgtatcaaaacaataagaaaagggaggcgaaaatgataaagaaccactaatgattaactatgtagtagtactttatcatagtcacagcttctttgttggggcctcgctgacttgcattgtctgtagaatttcttttcgaaattctctgtgttggggcccatccccaacttgcacattattgtaagctgacttttcgtcagcttctttgttggggccccggactataattgaaaaatgcttgttacaagcttattttcattcaattaactactgtctatataaaattgttgagccaagaacaaagtgaaatgctcccttcaaagccttcatttattcaatgtctactttgaagggagcatttgatcgattaatgtcccaggtttttcttgttattcattgcaattgcaaaataatatttaatgtgggttaaaagagttcattaaaactcagttattagggagtgggacagaaatgatattttcgtaaaatttatttcgtcgtcccaccccggcaaggttgactagaattgaaaaaagcttgttacaagcgaattttcgttcagtcaactactgccattataactttgtagagcatagaacattgatttatgtctcaggctctttacgaatcaatacctcgacgcattttttctgcaagcaaagtattatttaataccatagtaattgttaatggaccaacgccaccaggaactggtgtaatagctccagcaatttctttaaccgcatcataatcaacgtcaccttttaatttgccattttcatctggcgtattgccaacatcgataattactgctccttctttgaccacatcttttgttactaaactaggcttaccaactgcactgacaatgacatcagcatcttttaaatatgatgccatatcttttgaacgagaatgtaagattgttactgatgcatttttttgaagtagtaacttagaaactggttgtccgacaatatgacttcgtccaattacaactgcatttttagcttctaaatcaatatcagcatgttttaatatttccatgatgccgagcggtgtgcaaggtacaaaagtttgttcatcgatatataatttccctatatttattggatgaaatccgtccacatctttttcaggattgattgcttctaatattttctgttcgctaacttgttttggtaatggtacttgtaccaaaataccacttacagaatcatcattatttagtctatttagttcgtttaatacttcttcttcagtagctgtttcttccaaatgtacgatttctgaaatcataccaattttttcagctgctttcttttttgatctaacataactttgactagcgccatcattaccaactaatataacggataatttaggtgtaaaacccttttcttttagcgcttcaacttgatcttgtaacccctgtctgtagtctttggcaatttgtttaccatctaaaattttagcaaccataaaaacttctcctcctattgtcaatatcctaactttgttagtttataaaactaatttacatagcaaaagacgtaaattcaaacaaaaaatcaaaataaagttcgatttttgattgaaaaagcagaaattgcttgttatgctatatctataatatacaactaaagtaattcacaattcaaacttttgaaagggtgtacaaagtgaaagtagcagtcattatgggcagttcttccgattggaaaattatgcaagagagttgtaacatgttggattattttgaaattccgtacgaaaaacaagtagtatccgcacatcgtacgccaaaaatgatggttcaatttgcttctgaagcgagagaaagaggtataaacattatcattgcaggcgctggcggtgcggcacatttaccaggtatggttgcatcattaacgacgctaccagttattggtgtgccgattgaaacaaaaagtttaaagagtatagattctttattatcaattgttcaaatgccaggaggtattccggttgcaacgactgcaattggtgcagcaggtgctaaaaacgcaggtatacttgcagcaagaatgttaagtattcaaaatccttctttagttgaaaaactaaatcagtatgaatcttcgttaattcaaaaagtggaggacatgcaaaatgaacttcaataaattaaagtttggtgcgactattggcattattggtggtggtcagcttggaaagatgatggcacaatcagctcaaaaaatgggttataaagtggttgtattggatccttctgaagattgtccatgtagatacgttgcacacgaatttatacaagccaagtatgacgatgaaaaggcactcaatcaattaggacaaaaatgtgatgtgattacttatgaatttgaaaacatttcagcccaacaattaaaactattatgtgaaaagtacaatattccgcaaggttaccaagctatacagttattacaagaccgcttaactgaaaaagaaacattaaaaagtgctggtaccaaagttgtcccgttcatttcagtaaaagaatctacagatattgacaaagcaattgaaacattaggatatccttttattgtaaaaactagatttggtggctacgatggcaaaggtcaagttttaattaacaacgaaaaagacttacaagaaggttttaaattaattgaaactagtgaatgcgtagctgaaaaatatttgaatatcaagaaagaagtatctcttactgttacaagaggaaacaacaatcaaatcacttttttcccattacaagaaaatgagcatagaaatcaaatacttttcaaaacaattgttccagcgagaatagataaaacagctgaggcgaaagagcaagttaataaaattatccaatcgattcatttcattggaacatttacagtggaattttttatagatagtaacaaccaattgtatgtgaacgagattgcaccaaggcctcacaattccggacattattcaattgaagcatgtgattattcacaatttgatactcatattttagcagttaccggacaatcattaccaaattcaattgaattattaaagcctgcagtcatgatgaacttactaggtaaagacttagatttattggaaaatgaatttaatgaacatccagagtggcacttacatatttatggtaagtctgggcgtaaagatagcagaaaaatggggcatatgactgtactaacgaatgatgtaaaccaaactgaacaagatatgtacgctaaatttgaggggagtaattaaagcatgacattattatatgaaggaaaagcgaagcgcattttctcaacaaatcaagaaaatgaattaagagttgaatataaagatgaagttactgctggaaacggggctaagaaagacacaatggcaggtaaggggcgattaaataatcaaattacttctattatatttaaatatttacaagaaaatggaatagaaagtcactttattaaacaattatctgaaacagaacaattagttaagcctgtgaaaataattccattagaagtagttgttcgtaatattgctagtggatctattacaaagcgtttaggttttgaaaatggtgaagtttttagagaaccacttgtagaatttttctataaaaatgatgcgttaaatgatccgttgataacggatgaccatgttaaattgctcaatatagcatcagatgaagatattgaaatactaaaatccaaagcattaaagattaataatgtgttgaaacaattaatggatgctatgaatttaaaattagtagattttaaaatcgaatttggaaagactgagactggtcaaattttgttagcggatgaaatatctccagatacatgtcgaatttgggataaagctaccaatgcaaactttgataaagatgtatatagaaataacactggatcactgattgaaacatatcaaatatttttaaacaaattggaggatttaaaataatgaaaacaattgaactacatatcacattacaaccacaagtattagatacgcaaggacaaacgcttactcgagctgtacatgacttaggttatgcacaagtgaatgatattcgtgtaggaaaagtattatatatgacagtggatgaggttagtgatgaaaaggtacacaacattattacaactctaagtgaaaaattgtttgcaaatacagtgattgaagaatatagctataaagtgttagatgatgaaaaggagaatgcataaaatgaaatttgcggttcttgtttttccaggttcgaattgtgatagagacatgtttaatgctgctattaaaagtggtgttgaagcggaatatgtagattatagagaaacatcactaagtggatttgatggcgtacttattcctggtggattttcattcggggattacttaagatctggggcaatggctagtgtagcgccgattatttcggaagttaaacgtcttgcaactgaaggtaagccagtattaggtgtttgtaatgggtttcaaattttaactgaaataggcttattacctggtgcattattgcataacgattcacatttatttattagtagaaatgaagagttagaaatagtgaataatcaaacggcatttacaaatctttatgagcaaggtgaaaaagttatatatcctgtagctcacggtgaaggtcattattattgtactgatgaaatatatcaacaattaaaagctaacaatcaaattattctgaaatatgtgaataatccgaacggttcatatgatgatattgcaggaattgttaacgaaaaaggcaatgtatgtggcatgatgccacatcctgaaagagctttagaaacgttgttaggtactgatagtggtgtgaaattatttgaagcgatggtaaaaagttggagggaacaacatgtctaaatttatcgaaccaagcgttgaagaaattaaacttgaaaaagtatatcaagatatgggattaagtgatcaagaatatgaaaaagtttgcgatattttaggcagacaacctaactttacagaaacaggtatcttttctgttatgtggagtgaacattgctcttataaacattctaaaccgtttttaaagcaatttcctacgtcaggtgagcatgtgcttatgggtccaggtgaaggtgcaggggtagtcgatataggtgataatcaagccgtagtatttaaagtagagtctcacaatcatccatcagcaattgaaccatatcaaggggctgctacaggcgttggtggaatcattcgtgacattgtttctattggggctagacctattaatttgttaaacagtcttagatttggagaattagataataaacaaaaccaaagattacttaaaggggttgtaaagggtatcggaggttatggtaactgcattggtattccaacaactgctggtgaaatcgaatttgatgaacgttatgatggcaatccacttgttaatgcaatgtgtgttggtgttatcaatcacgacatgattcaaaaaggcacagcaaaaggtgtaggtaattcggtcatttatgttggtttgaaaactggtcgagatggtattcatggtgctacttttgcatctgaagaattgacggaagaaagcgaaagtaaacgaccttctgtacaaatcggtgatccatttgtaggtaaaaaattaatggaagcaacacttgaagcaattacatttgatgaattagttggtattcaagatatgggtgctgctggtttaacatcttcatcgtctgaaatggcggcaaaaggtggtagtgggttacatttgagattagaacaagtgccaacacgtgagccaggtatttctccttatgaaatgatgctttcagaaactcaagaacgtatgttactagttgttgaaaaaggtaatgaacaaaaattcttagatttatttgataagcacgaattggatagtgctgttataggtgaagttacagatacaaatcgttttgttttaacatatgatgatgaagtttatgctgacattccagttgaaccactagctgatgaagcacctgtatatattttagaaggagaagaaaaagattataatacttctaaaaatgattatacacacatcgatgttaaagatactttctttaaattacttaagcatccgactatagcatctaaacactatttatatgatcaatacgaccaacaagttggtgccaatacgataattaagccaggacttcaagcatcggtagtacgtgtggaaggcacaaataaggcaattgcttcaacaattgatggtgaagcgcgttatgtatataacaatccatatgaaggtggaaagatggtagtagctgaagcttatcgaaatttaattgccgtgggtgcaacaccattagcaatgacagattgtttaaattatggttctcctgaaaagaaagaaatctatcaacagttgatagattcaacgaaaggtatggcagaagcatgcgacattcttaagacaccagtagtttctggaaatgtatctttatataacgaaacgaaaggtacttctattttcccaacaccagttgttggaatggtaggtttgattgaaaatgtaaattatttaaatgattttgaacctcaagttggagataaattatatttaatcggtgatactaaggacgactttggtggtagtcaacttgaaaagttaatttatggcaaagttaatcatgaatttgagtcattagatttgagttcagaagttgaaaaaggtgaatcaatcaagaccgctattcgtgaaggactattatcacatgttcaaacagttggtaaaggtggcttactgattaccttagctaaactaagtgcgcattacggtttaggattaaaatcttcaatagatataacaaatgcacaattgtttagtgagacacaaggccgatatgttgtttctgttaaatcaggtaaaactttaaatattgataatgcaatagaaattggacttttaacagatagtgataatttcaaagtaacaacaccatatacagagattagtgaaaatgtttcagatattaaacaaatatgggaaggggcaattgctcaatgtttaactactcaggattaaacgaagaatgtggcgtgtttggtatttggaatcatcctgaagcagcgcaactaacatatatgggacttcatagtttgcaacatcgtggtcaagaaggtgcaggtatagttgtttctgatcaaaatgaattaaaaggcgagcgaggattaggcttactaactgaagcgattaacgatgatcaaatggaacgattaaaaggatatcaacatgcaattggtcacgtccgttatgctacttcaggtaataaaggtattgaaaatattcaaccgtttctgtatcacttttatgatatgagtgtaggtatttgtcataatggtaacctcattaatgctaaatcattgcgtcagaatttagaaaaacaaggtgctatcttccattcgtcttcagatactgaagtcattatgcatttgatacgtcgaagtaaagctcctacttttgaggaagcattgaaagaaagtttgcgaaaagttaaaggcggttttacatttgcgatattaactaaagatgcgttatatggcgcagtagatccaaatgctatcagaccacttgttgtaggtaaaatgaaagatggtacatacatccttgcaagtgaaacatgtgcaatagatgtgttaggtgcagaatttgttcaagatattcatgcaggtgaatatgtcgtgattaacgataaaggtattacagttaaatcttatacacatcatacgacaactgcaatttctgcgatggaatatatttattttgctagaccagactcaacaatagctggtaaaaatgtccatgcagtacgtaaagcttctggtaaaaaattagcccaagaaagccctgtaaatgctgatatggtcatcggtgtacccaattcatcgctatcagctgcgagtggttatgctgaagaaataggtttgccatatgaaatgggactagttaaaaatcaatatgttgcaagaacatttattcaaccaactcaagaattacgtgagcaaggtgtgagagtgaagttatctgcggtaaaagatatagtagatgggaaaaatatcattcttgttgatgattccattgttcgcggtacgacaattcgacgcattgtgaaaatgttaaaagattctggtgcaaataaagtgcatgtgcgtatagcatcaccggaatttatgttcccaagtttttatggaatcgatgtttcaactacggcagaattaatttctgcaagcaaatcacctgaagaaattaaagattatattggcgctgattcattagcatatctatctgtagatgggttaattgaatcaattggtttagattatgacgcgccatatagtggcttatgtgtagaaagtttcactggagattatcctgcagggttatatgattatgaagcaaattataaagcacatttaagtcatcgacaaaagcaatatatttctaaaaacaaacacttttttgatagcgagggaaatttaaatgtctaaagcatatgaacaatctggtgtaaatattcatgctggttatgaagctgtagaaagaatgtctagtcatgttaaacgtacgatgcgtaaagaagttatcggtggtttaggtggattcggtgctacatttgatttatcacaattaaatatgacagcgccagttttagtttctggaacagacggagtaggtacgaaattaaaactagctatcgactatgggaaacatgattcgataggtatcgatgcagttgcaatgtgtgttaatgatattttaacgacaggtgcagaaccattgtattttttagattacatcgctacaaataaagttgttcctgaagttattgaacaaattgttaaaggtattagtgatgcatgcgttgaaacgaatactgcacttatcggtggagagactgctgaaatgggtgaaatgtatcacgaaggtgaatatgatgtagccggatttgctgttggagcagttgaaaaggatgactatgtagatggttcagaagtgaaagagggacaagttgttataggacttgcgtcaagtggcattcattcaaatggatacagtttagtgcgcaaattaattaatgaatcaggcattgatttggcatcaaacttcgataatcgtccatttatagatgtctttttagaaccaactaaattatatgtcaaacctgtacttgctttaaaaaaagaagtttctattaaggcaatgaatcatattactggtggaggtttttatgaaaatattccacgtgcattgccagccggatatgctgctagaattgatactacatcatttccaacgccaaaaatatttgattggttacaacaacaaggcaatatagacacaaatgaaatgtataacatttttaacatgggtattggctatacggttatcgttgatgaaaaagatgcatcacgcgctttgaagattttagcagaacaaaatgtggaagcttatcaaattggtcatattgtgaaaaatgagtcaactgcaattgaattgttgggggtataacaatggttaaaattgcgatttttgcatcaggttcaggaagtaactttgaaaatatagttgagcatgttgaatcaggaaaacttgaaaatattgaagttacggcgctatatacggatcatcaaaatgcgttttgtatagatagagcaaaaaagcacgatattcctgtttatattaatgaaccaaaacaatttgattcaaaagcagcgtatgaacaacatttagtaacattattaaataaagataaggtagagtggattattttagctggctacatgcgtctaattggtccagatttattagcttcatttgaaggtaaaatattgaatatacatccatctctattgccgaaatataaggggattgacgcaataggccaagcatatcatagtggcgatactattactggttcgacagtacattatgttgattgtggtatggatacgggagaaattattgaacagagacaatgtgatattagaccggacgattcaaaagaacaattagaagagaaagtaaaaaaattggaatatgagttatatccaagtgttattgctaaaattgtaaaataaggagtatgtatgtgatgaagaaagctattttgagcgtatcaaataaaacaggtattgtagagtttgctaaagcgttaacgcaattaaattatgaattatattcaactggtggtactaaacgtatattagatgaagcaaatgtaccagttcgttctgtttcagacttaacacattttccagaaataatggatggccgtgttaaaacattacatccggctgttcatggtggcattttagctgatcgaaataaaccgcagcatttaaatgaattatcagaacaacatatagatttaattgatatggtagtagttaatttatatccattccaacaaactgttgcaaaccctgatgtgacgatggacgaagcaattgaaaatattgatattggtggtccaacaatgttacgtgctgcagctaaaaactataaacatgtaacaacaattgtacatccggcagattatcatgaagtattgacgcgattaagaaacgattcgttagatgagtcatatagacaatcattaatgattaaagtttttgagcatactgcagaatatgatgaagcgattgtacgtttctttaaaggggataaagaaactttaagatatggagaaaatccacaacaatcagcgtattttgtgagaacttcgaatgctaagcacacgattgcaggtgctaaacaattacatgggaaacaattaagctataacaatattaaagatgcagatgctacactagctttagttaaaaagtttgatacacctgctgcagttgcggttaaacacatgaatccatgtggtgttggtatcggtgacacgattgaacaagcatttcaacatgcgtatgaagcggatagtcaatcaatatttggtggaattgttgcattaaaccgagctgtaacacctgagttagcagagcaattgcatagtatctttttggaagtcattattgcaccaaaatttacagatgaagcattagatattttaaaacaaaagaagaatgtaagattattagaaattgatatgactatagacagtaacgaagaagagtttgtttcagtatctggcggatatttagttcaagataaagacaattatgtcgtgccaaaagaagaaatgaaagttgttacagaagtagcacctactgatgaacaatgggaagcaatgttattaggatggaaagttgtaccatcagtaaaaagtaatgcaattattttaagtaataataaacaaactgtaggtataggtgctggacaaatgaatcgtgtcggtgctgctaaaattgcgttagagagagctattgaaatcaatgatcatgtagcgttagtatctgatggatttttccctatgggagatacagttgaacttgcagcacaacatggtataaaggcaattatccaaccgggtggttcgattaaagatcaagattcaattgatatggctaataaacatggtattgcaatggtagtcacaggcactcgacattttaaacactaattttaaaggggcgtaacataaatgaatgtattagtaattggtgctggtggacgagaacatgcacttgcatataaacttaatcaatcgaatctagttaaacaagagtttgtcattccaggtaatgaggcaatgacacctatagctgaagtacacactgaaatttcagaatctaatcatcaagggatactagattttgctaaacagcaaaatgttgattgggtagttataggtccagaacagccgctaattgatggattagcagacattttacgagcgaatggtttcaaagtgtttggtccaaataagcaagcagctcaaatcgaaggctcaaaattatttgctaaaaagataatgaaaaaatataatattccaactgctgattataaagaagttgagcgaaaaaaggatgctttaacatatattgaaaactgtgaattgcccgttgttgtcaagaaagatgggttagctgctgggaaaggcgttattattgcagatactattgaagcagccagaagtgctattgagattatgtatggtgatgaagaagaaggtactgttgtatttgaaacgtttttagaaggtgaagagttctcgctaatgacatttgttaatggtgatttagcagtacctttcgactgtattgcacaagatcataaacgcgcatttgatcatgatgaaggaccaaatactggtggtatgggggcttattgtccagtaccacatattagtgacgatgttttaaaacttacaaatgaaacaattgcacaacccattgcaaaggcaatgcttaatgaaggttatcaattcttcggtgtattatacattggtgctattttaactaaagatggtccaaaagtaatagaatttaatgcccgttttggtgatcctgaagctcaagtattattaagtcgcatggaaagtgatttaatgcagcatattattgatttagatgaaggaaaacgtactgaattcaaatggaaaaatgaatctattgtaggggtcatgttggcatcaaaaggatatcctgatgcatatgaaaaagggcataaagtaagtggctttgatttaaatgaaaactattttgttagtggattaaagaagcaaggtgatacctttgttacttcaggtggtagagttatacttgccatcggaaaaggtgacaatgtacaagatgcacagcgagacgcatacgaaaaagtatctcaaatacaaagtgaccatttattctatcgtcatgacattgcgaataaagcactacaacttaaataagtatatttaaaaaatactaagattagctatgaagaaatctataacgatagttttttttcatagcttttttagttgtagagtctaggacattgatttctgtaccaaatttgtgattatgcatatgtaatacaaaagaggcgccacaacatgtttggatgaacaaaataacatgtttgtggcacctcttttgtttagtatggaataaatggttttctttttctatacaatgaatttctaatttagtatctatacaattatggataaaatttaacctacacgaccaagacgaacatcatctatgcccgtgatgggtaaggtgattgaacaataatatgccatagtaataatggcaattaaaactataataaagattatatctttatatgagaaaggtacgttgtaatagtaagtacgaggaccatctctaaatcctttcgactccatcgcaactgataattgatgtgcctttctaatattttggcttaatagaggtataattaaatgcttaaatctctttaaccctctataatttgctgcgtctatcatctgatagcgcatttttaaagatctgcgaagctgtattaaagaactaatcattaaaggtatcatacgaatggcagccatgaatgcataagcaacttttgatttaacctttaaatgttgcattaaactataaaatatcatgacaacctgagatgtaagtgcgattaagataccgaaaaatgaaatagcaatggttcttaatgatacatgtaaaccacgaactaaactttctgttgtaatatggataaatccgaatttcaaaattgtatggctaccattcccgtataaaatcatgaacagggaagagagtaatgcaaagccaatacttatagttataaaaattgctgtaattttaaactgagtaccattaaacatcaataagaaaactaacattaagatagtgatataaagcataaaatcgaaattatgcacaaatataataaagaaaaatagtataattccaagaaatagtttcgttataatgttgacatcatcaacaaatgattgccgaactttccattgctcatacattcgtatcaccatcacaatctagtaacgcaccatctgaaattttaagtcttcttgatggataacgttcaattatttcatcgtcatgtgtaaccatgacaatactttgtcccaaattaattcgcttttggaaaagtttgatcaactggaatgtattatggctatcaagtccaaatgtcggttcatctaaaaagataatatcagctttagaacttagtgcggtagctacgctaaggcgtcgtttttgaccaatagacaactcataaggatgttgatcttttacattttgtaaatctaaaagttttaaaagttgtatcgtttcatcatcactttgatctttagaaaggtgattaaaatgaatgttaatttcatcataaaccgaatttgttataaattgtaattctgggttttgataaactaggtacatgtgttttgctgcatgtttaatttttgttaaacgctgattttcaaaataaacatcaccttgatatttaatcaattgcataattgattcaagcaaggttgttttaccactaccatttgcccctgtaattgtaatccactcacctagaccaatttctaaatctgagaatgagagcaatgttgatttaccgcgaataatacgtccatttttaaattgtaataagtgtgagtttgttgttggaaagtcaacacgacttggtgcgaattcccatgcacgtggatgccacacaccatattcactgagtaaatgaacatacttctgtaatatgatttcaggacattcatcggcaatgatatttccgttataatccatcaaaatgacgcggtcgacatgattccagatgtgtttaactttatgttcaacgattacaacagtttgatcttcccaaagttcaattagtttagtccataaatcttctgttgcttgaacatctaacattgctgtcggttcatctaaaaacaatgtttttgattgttgaagaatggtttcaacaattgccaatttctgtttcatcccgccacttaaatctttgatatacgtttcaggggtaacatttaaattgaccatatttaaagcattgataattaacgcatccatgtcttcacgtggtacttgtctattttctaaaacgaatgcaagttcttcgtatacttttggcatacaaaactggctatcagggtcttggaaaataacgccacttaatgggtcaacgattagttcatcatatttcataggtaattcaattaaattaggaacaataccacttaatacattcagaagtgtacttttaccgcaaccagaaggaccgagtaaaagtactttttctttgtcttgaatagtgatatttaaatgatcgaaaattttacgctgaccatttggatattttaatcgtaaatcacttacttttaacactctgaatgctcctcttataagttgtcgtaatcttctttagcagctggtctaaataattttgttacgcctgtcttatctaaagcttttactaaaaggtaagataggacgccggcgactactgcaccactaattaatctaaatacgatgaataatgttaagttccaacctgcaacttcatttaaataaccatagaaataatctatagggaaagccgcgattgctgtacaaaaacctgctaacatagctaccataactgaacgagattgatatttaaaaattgcaaagacaagttcacacgctaaaccttgtatgaaagcgtaaacgattgtcggaatatcgaaacgacccataatgatagtttcgccggcacctgcagcaaattcagccagtaaagcaatacctggttttggaataattagatagcagacaatcgctgccatgaaccaaaccccgtttgttaattgttcgaggtgaaggcctgtagcttgcacaccattgtaaacaaaccaccataaattgtaaataactgcgaatactactgaaataagtacggttactagtatttcagatagctttaaaccttttgacatttttacatcctcctaataaaaaaacgcacaaccatccataggaaagttatgcgttcacaatatatattagtaaaacatatgtatagtaacactttcctacgctagttcaagctagatcaggttcaaagggtttgagggcaagcctcatctcagtataaaacacccctagtgtgtgcgatttatttaattaattatactgtaagacgtttgtaaacttatgtcaataggttgtcttcatgaaatttcgtttaattcgatttaaaatttataatattagcattggatttaaattgaagatgtagtaggaatgttagtaattaaagatataaaaatatgtgacatgtaataagattgagctgataaatgaagagggatacttatcaatcatacctctttaacaacagtgaagaacccgtgcataatggcttacgaattatagtttgtagggtaaaagagggatacatgcgccgagcacatgcaaaaaagcccctaacaactaaaagttgtaaggtaaaagagggatacatgcgccgagcacatgcaaaaaagcccctaacaactaaaagttgtaaggtaaaagagggatacatgcgccgagcacatgcaaaaaagcccctaacaactaaaggttgtaaggaagaagagggatacatgcaccgagcacatgcataaaatcccctaacaactaaaagttgtaaggtaaaagagggatacatgcgccgagcacatgcataaaatcccctaacaactaaaagttgtaaggaagaagaggaacacatgcgccgagcacatgcataaaatcccctaacaactaaaagttgtaaggggatttaaattaatttagtgtatcttggatatcttgttttgtttgattaatatcttctgttttttcttcttttttatcttttaatttttcttcaacttctttagctttttctgctgcttttttattttgattttcattagacatgattaattcctcccaaattggataattatttatatataaatcttacccggttgtactttcgttaaacttttctaagtctatagcactatttattcatttatctaaagacaacaacattagattaatatataatgattttgaggtgaacataatgtcttttcttaggaaacacgccgaaattatttttagctatttaatcggtatcgtttcactcttcactggtctcattattttaattaacttgccattaattaaacaattaaatggtggtaaaaaagttgatacacatgttcataatgtgtgggaatttctgaatgcatttttcagtgaaattattaaagtaatgagtcgatttataggtaatttccctatagttagtgcaattgtgataattatattcggtattttagttatgttgattggtcatacattacttagaactattaagtatgactatgatatttctatctttttcttagttatcggtatcatgtactttattattactcttatattaatgactcaagtttatggattctttgcagtgattttcattattccatttacaattcatataggatatatcgtctataaagatgaattgaatcaggaaaatgtaaaaaatcatttcatgtggataattgtgagttatggtataagttacttaattacacaaattgcattgtatggcagaattgatgctaatgaaatagagtcaattgatatcttaagtgtcaatgctttctttataattatgtggttacttggtcaaatggctatttggaatttcttgttcttgcgccgagctttacctttaacaaagcaagaattaggtgaagaggagccagaattatcaagaacaagtaaagggaatgtcacgaatcaaactaaaattcacttgaaacaactccaagataagactacagaatatgcacgtaagacaagaagaagtgtcgatttagataaaattagagctaaaagagataaattcaaaaagaaagttaatgatattatcgatattcaagaagacgatattcctgattggatgagaaaaccgaaatgggttaaaccaatgtatgtcgaactattttgtggtgtcgtcatctttttattcacatttttagaatttaataatcgtaatgcattatttgtatctggtgattggaaattatcacagacacaatatgttattgaatgggttacattattaattctgttattcattattatcgcatatatcgctacaacgttaactttccacttgaaaggtaagttttattatttacaactatttatggggagcattttattctttaaattgttaacggaatttataaatataatgattcatggactactactttcagtgttcattacgccaacattactattaatgttattggcaatcatcatttcttattcgttacaattacgagagcgaccataattaaaagcattataaaagtactatctattaaacattttgatgtgtacgctataagttagatatatctctaacttatttagatacaggtcaatgaagtttatggatagtactttttttgtaactagatttgattgattcaggtgatgtgaattaagtattgaaaattgtatacaaagttttagtgcaaataaaatagttgaaaagttatccatttgtaaaatcaagaaaactagtaaatagttgaagcgacatatggaatttgcgaaacgatatatagtatttcctttgtagaaatttaacatatatcattcgaattactaatttgttaaaatcaacagtaagattagaagtagatgatattgaaatttggcaaacaatttaatctatataaaactacaacgaaacacagaaaggaagttgtcagatgaaaatagcaactctgaacaaaggcaaagaaacaaaatattttaatggatatcctttaattgaagaagaggatatctattcacaagatcatttaaaagaaggagatatttttcaaattgtgactgataaatcacaatatgttgcaacggcttatgttggtcgccaacataaaggattaggttgggttctaacatacgataaagctcaagaaatcaacacagctttctttgtgaaattgtttaatactgcattagcagaacgtgattattattttaatatagatggaacaaatgcttttagattatttaatgctgaaggtgatggtgttgggggattaacaatcgacaattacgatggtcatttgttgattcaatggtactcaaaaggtatttataaatttaaatatgccattcttgaagcggttagaaaagtatttgattataaatctatttacgaaaaagtaagatttaaagacagcgaatatagtggtggttttgttgaaggcgatgcacctgagtttccaattgttatcgaagaaaacttcacattttataatgtagaccttgaagatggtttgatgacaggtatctttttagatcaaaaagaagtgcgcaagaaattaaggggtcaatatgccaaagaacgccatgttttaaacttatttagttatacaggtgctttttctgtaatagcagcaagtgaggcatcttcaacaacaagtgtagatttggctaatcgttctcgtagtttaactgaagaaaattttggattaaatgctattgatcctaaatcccaatatatttatgtcatggacacttttgatttctataaatatgctgcacgacatggacatagttatgacacgatcgtgattgatccacctagctttgcacgcaacaaaaaacgtacattttcagtgcaaaaagattatgacaaattaattaatggcgccttaaatattttatcatctgaaggaacattattgttatgtacaaatgcaagtgtatatccattaaagcaatttaaaaatactattaaaaagacgcttgaagagagtggcgttgattatgaattaactgaagttatgggtttaccaaaagattttaaaacgcatccacattataagccatctaaatatttaaaagctgtttttgtaaatattagacattaatttgataaaaaggggtatagtaacttattgagaaaaagaagggtgataatattatgggattcaaaaacaatttaacatcaaatttaacaaataaaattggtaattcagtctttaaaatagaaaatgttgacggaaaaggtgcaatgccaacgacgattcaagaattgagagaaagacgacaacgtgctgaagcaattgtaaagagaaagtctttaatgtcatcaacaatgagcgttgttccaattccgggtttagattttggtgttgatttaaaattaatgaaagatattatcgaagatgtaaataaaatatacggattagatcataagcaagttaatagccttggggatgatgtgaaagaaagaattatgtctgcagcagcaattcaaggtagtcaatttattggtaaaagaatttcaagtgcatttttaaaaatagttattagagatgtagctaaacgtactgctgcaaaacaaacaaaatggtttcctgttgtaggacaagctgtgtctgcatctattagttactattttatgaataaaattggaaaagatcacattcaaaaatgcgaaaatgttattaaaaatgtcatgtaggtgctataatagttttgcaatttgcaaattttactgaaaccggttttaaacgaattgaatttaaagcatggttttggtaaagttaatgtataaaactaagttagtattgtaataatattgaagattctaactatacgaaggagaaatgtaattatggaacaaaattcatatgtaatcatcgacgagactggtattcacgctagaccagcaacaatgttagtacaaacagcttcaaaattcgattctgatattcaattagaatataacggtaagaaagtaaacttaaaatcaatcatgggtgttatgagccttggtgttggtaaagatgctgaaattacaatttatgctgacggtagtgatgaatctgacgccattcaagcaatcagtgacgtcttatcaaaagaaggattgactaaataatcatgtctaaattaattaaaggtattgctgcatctgatggtgtcgcaattgctaaagcttatttattagttgagccagacttaacattcgacaaaaatgaaaaagtcactgatgttgaaggagaagttgcaaagttcaatagcgctatcgaagcttctaaagttgagttaactaaaattagaaataatgcagaggttcaactaggtgctgataaagctgctatctttgatgcacatttattagttttagatgaccctgaattaattcaaccaatccaagataagattaaaaatgaaaacgctaatgctgctacagcattaacggatgtaacaacacaatttgttacaatttttgaatctatggataacgaatacatgaaagaacgtgcggctgatattcgcgacgtttctaaacgtgtgttatcacatattttaggtgtagaattaccgaatccgagtatgattgatgaaagcgttgttattgtagggaatgacttaacgccatctgatactgctcaattaaataaagaattcgtacaaggttttgctacaaacattggcggaagaacaagtcactctgcaattatgagtcgttctttagaaattccagcaattgttggtacaaaatcaattactcaagaagttaaacaaggcgacatgattatcgtagatggattaaatggtgatgtaatcgttaatccaactgaagatgagttaatcgcttatcaagataaacgtgagtgttattttgctgacaagaaagaattacaaaaactacgtgatgctgatactgttacagttgatggtgttcacgcagagcttgctgcaaatattggtacacctaatgatttgccaggtgttattgaaaatggtgcacaaggtatcggcttatatagaactgagtttttatatatgggtcgtgaccaaatgcctacagaagaagaacaatttgaagcttataaagaagtattagaagcaatggacggtaaacgtgttgttgtacgtactttagatataggtggagataaagaattatcatacttaaacttgcctgaagaaatgaatccattcttaggttaccgtgcgattcgtttatgccttgcgcaacaagatattttcagaccacagctacgtgcattattacgtgcatcagtttatggtaagttaaatatcatgttcccaatggttgcaacaattaacgaatttagagaagcaaaagctatattattagaagaaaaagaaaaccttaaaaatgaaggtcatgacatttcggatgatatagaattaggaatcatggtagagatacctgcaacagcagcattagctgatgtctttgctaaagaagtagatttcttcagtatcggtacaaatgatttaattcaatacacattagctgctgaccgtatgtcagagcgtgtatcatatctataccaaccatataacccttcaatcttacgtttagttaaacaagttattgaagcgtcacataaagaaggtaaatggacaggtatgtgtggtgaaatggctggagatgaaacagctattccattattgcttggtttaggtttagatgagttctctatgagtgcaacgtctattctgaaagcaagaagacaaattaatggtttaagtaaaaatgaaatgactgaacttgctaaccgtgcagtcgactgtgcaacgcaagaagaagttattgaattagttaacaactacgtaaaataattaattctttcgaaagacagaattataaataaacccgaagtattcattgtgagtaattatgaatacttcgggttcttttttatgatttatgttaatttcaatggaatgttgttgctaactaattaaacaactatgtgtcattaacaaaatgttgttctttaattaatgttagttaatttaaaaatcgatatttaatttatgatagctataaatgatgaagttgatttagatgaaaattaatcttggatatttaatactttgttgatttcatcaagatcaacatggtacattggattgccattcaacaaaataaacggagttgaaaaagcatcaaaatctatcatttcgtttcgatattgttgattgttgatatttctctcttcaaaatcaatttgatgctcatttagataattttttacaaatgtacaaggtggacaatcattctgcgtataaacgattatttctgacatgtatcatgctccttcgtgctttattctaatgtaatatacacaattatacattgaaattcaaatttgtgaacacattgtgaactgacataaattatacacaatttcatagcgcataatgttttaaaaatacacattatagcaattataattaagttcattgtgttgtcatcaaaaaaagaaaaaggtgatgtttttaaatggatacagttgaaatcagtcggtttttgacagctatgactttagcagttcatatcatttttgcaacgattggtgttggtatgcctttaatgttcgcaattgcagaatttttaggtattcgcaaaaatgatcttcaatatatagctatggccaaaagatgggctaaagcttatacaattactgtagcagtgggagttgttacaggtacaattataggacttcaattatcattgatttggcctacatttatggaaatgggtggacacgttattgcacttccattatttatggaaacatttgcgttcttctttgaagctattttcttaagtatatatttatatacttgggatcgttttaaaaataaatggacacatttcttaattagtataccagtaattattggtggctctttctcagccttcttcattacttcagtgaattcatttatgaatacgcctgcaggttttgagttgaagaatggaaagatggtcaatgttcaacctatagaagcgatgtttaacccatcgtttatagttcgatcatttcacgtaattactacagccggtatgacgatggcatttgttattgcatcaatagcagcttttaaattattgcgtaatcgtcaacctaaagatactgtctaccataagaaagctttgaaaatgtctatgattgttggattcttttcaactttactttctatgttggcaggggatttatctgcaaaatttttgcataaattccaacctgaaaaattagcagcttatgaatggcatttcgatacatcttcccatgctaaattattattatttggtgtgttagatgaaaagactcagcaagttaaaggtgcgattgaattacctggactattgagtttcttagcagataatagtgtcaaaactaaagtgcaagggttaaatgattttccaaaaagtttacatccgcctatgattgtccattatttctttgatttaatggtaacgatgggaattttatgttttgtcatttcaggtgtttatgttttaactttaatgtttaaaaagcttagaaagttttctactcataaatggatgctttacggaatattattaacaggaccagcttcaatgctagctatagaatttggatggttcttaacagagatgggtagacagccttggattgttcgtggttatatgcgcgtggcagaagcagcaacacaagcaggcggaataaccttcgttacaattttatttggcatattgtacatcattttaatgtatacatgtgcatacgtattaattcgtatgtttaaaaataaaccggcgtatgaagatgtaaatcgtttagccaagaagcaaggaggagaaatagaaaaatgatttatgcatttataggtataacagtgttatggttgtttttattttgctatatcattattgcttctatagattttggggcaggtttcttcgcattgcattcaaagttaactggtgatgaaaagaaaattaatcacttaatttcacgttatttgaacccagtttgggaagttacgaatgtattctttgttttcttcttcgtaggattcgtaggtttctttccagagtcaatcaaatatttaggcacggtattgttaataccaggttcaatagcactgattatgatatcattgagaaacagtttttatgcatttgaaaattatggtcaagatacaaaattagcatggatgatcatgtatggggtaagtggattattaattccagcttcattatctactgctttaactattacagaaggtggctatattaatgttcgaaacaatgttatcgatctagattgggtgcagttactattaagcccatttgcttggtctgtagtattcttggcaattatttcagttttatatatttcatcaggatttttgacatattatgctaaaaaagcaaatgacgaaccagcatataatttaacaagacaatggcacatatttttagggccaccgatgattatcatttgtttattcgtatttctatcattacgcattcaaaattctgaacatttttattcagctgtttttgactactggtggatgtttgctataagtttcttattctttgcattagcttcattgttaacattctttaagaaaaaacatggtttggcttttgtatttgttattttacaaatgatgttcgcgttctttggctatggaattagtaaattgccataccttttatatccgtttgtaaaaattacagatgcatatgttaatccagaaatgggctggacattagtgattgtctttattttaggtttacttttattacttccatcgttaatattattattaagattatttgttttcgacaaagaatatgttgaaggaaagaaatcataagttgagacgataccccaactttcatttacttgcattactgcatttagataatttagttggggtactcatttataataattttaaatttatattttcaatgaattgatgaaaatcatttaatggagggcgagtatgggtaaagaatatgtagtcatcggtctaggtcgttttggaggtagtatcgttcgtgagttgaatgcattagacatggatgtaatggccatcgaccatgatgaaaatagagtgaatgaatatagtgatatcgctactcatgcggttgttgcagacacaacagatgaagcagttatgaaaagtttaggtatccgtaactttgatcatgtcattgtggcaattggtgaaaatattcaatcaagtacgttgacgactttaattttaaaagagttaggtgtaaaaaaagtaactgctaaagcacaaaatgattatcatgcaaagattttaaataaaattggagcagatacggttgtgcaccctgagcgtgatatgggtagacgtattgcgcataatgttgcgagtgcaagtgtacttgattatcttgagttggcagacgagcattctattgtagaattgaaagcaactgaaaagatggcggggcagtctatcattgatttagatataagagcacaatatggaattaacattattgcaattaaacgaggcaaagagttcatcatttcaccaaatccaaatattaatttagaaataggtgatattttaatcatgattggacatgataatgatttaaatcgctttgaaaaaaatattgcgacgagataatcgggagtgggacagaaatgatattttctcaaaatttatttcgtcgtcccaccccggcaaggttgactagaattgaaaaaagcttgttacaagcgcattttcgttcagtcaactactgccaatataactttgtagagcattgaacattgatttatgtctcaagctcatcatatataaagaaaaagctactaacaatgggtggtgagtttaattaaaacttcacttcaaagttagtagctttttgattatttattgtttgattctttttgttcgtttaccttcataatgactggtaaaatcattggttttctagctgttttttcaaataaataaggttgtaatgtttcaatgatagaagatttaatctgatgccattgaatatctttattttgatttaacttactaataacatcagttttgattttgcgttgtgcatcataaattaattgacctgattccctcatatatacaaatcctcgagaaataatgtctggaccagaaagtaatttatttgtattaaaatcaatactaacaacaacgataactaaaccttcttcagataatagcttacggtctcttattacaacattaccgatatcaccgataccactaccatcaacaagtacattaccagatggaatgcgaccagctttacgtgctgaatcgtgtgttaaagctaagacatctccaatatcaaagatgaagacattatcttcttcaacgccgcattcaacaccagtctcaccatgtgcttttaacatacggtattcaccatgaataggtaagaaatatttcggcttgattaatcgaagcattaattgttgatcaccttgagaaccatgccctgaagtatggatgttagaaatcttgctatggataacatctgcaccagctttatacaaggaattaatagttctgttaatactttttgtattacctgggataggtgatgaactaaatacaacggtatcttcaggtataattttaatttgcttatgagtaccattagcaattctagataatgctgccattggttcaccttgtgaaccagtacatagtatcaataactcatgcttcggtacggtattaattttattaggttcaataaatgtttcaggtggtgctttaatataaccaagttccataccgattttaatattgttttccatcgaacgaccgaacgtaacaattttacggttatttttgatagcagcttcaactgcttgttgaactcggtaaatattagaagcgaaggtagcaaatataatacgacctttacaattacggaagatcttatctacgttttgaccaacttcacgttcgcttaaagtaaaatcaggcacaagtgaatttgttgagtctgaaagtaaacatagaacgccttcttcgcctaattgagccattttagcaatgtttgctggtttgcctacaggtgtaaaatcaaatttaaagtcaccggtatgaactacttttccttcaggtgtatctacgatgacgccataagtttcaggaatactatgcgtagttaagtagaaagaaatcgtaaagtgcttagatttaatcacactgtcctcattgatttcatttagtttagcagtacgtaataaatgatgttcttcaagtttattacggattaaacctaatgctaaaggaccaccataaataggtatattaagttgttttaataggaagggcacaccgcctatatggtcttcgtgaccatgtgttataaataggccaacaattttatcttggttttgaactagatatgtgtagtcaggtataacataatcaatccctaataagttatcatcagggaatttgatacctgcatcgataatgacaatttcgtctttatactcaactgcataagtatttttaccgatttcacctagacctccaagtgcatatacacctacttcatttggatgtaattgtttcattatttagcaatctccacattaaagtgttctgagttttctttttcgtaatctaaatgtgcgccctctaatttagtgataaattcgatattaaaattacgatctttcaagtaacgacgtacttgttcttctgtttgagcttcaacataaagtgattgtgtattttcacgcacaattacctcgtctctgttatgttgataaaaaactttaaatactgccatgttaaaaattcctcctaagaatgtttgtttaatttattgttaaccctagtaaaatcgtattggagtatatatcgataaattcattccaatcatctctataatttaacttaataacgatttggttaataactaggttcatcatgtcgttcattttaaaaaattagtgaaataacactaaaatttcagttaaatcttattttacatgatgaatgataataaataaagcagtttatctcactagaaatctaagtatttcgaataaatgtgcagttctatttattaaaataaatgtagagattataaattaatgttaagaaagaattaaaggattttatatgaaacggtaaaatttaaatgaggggataaaaagtttggtagaaaggtgaatatatttaactgttgtttattcgaaaaagttgtacaagaaaaagcttaggacatcatatttatcctaagctttgataattagtaaaaatgtgctttaaacttctacagcatctgtatgtggttgtaatgggtgatttttgtcaatgtgatcatagaacattacaccatttaaatggtcaatttcatgttggaaaacaattgctggatatccttttagtcgtaattgtatatcattaccttcgatgtctttggctttaattgtaattctattatgacggtgaactagaccagcaacattatcatcgacactaaggcaaccttcaccagttggtaaataagcttcttgaacgctatgacttacaatttttgggttcacaagcatatagtcataagatttgccactgccatcatctggtattaaaacagcaatcatacgtttagaaatattaatttgaggtgcagccaaaccaacgcctgaacgtaaaccatatcgtttcgcgatttcctcatcttgactatttactaaaaactctctcatggcgattaatgtttctttttcttctttagttaatggtaattctaactcagctgctttttgacgcaaagttggatgaccatctctaatgatgtctttcattgttaacatatattgcaccttccttattttaatttgttttagttgaatgacagtaaaaaggttgttaagatactcatacatttttatgtgtaaatatctacaaagttaaccaactactgccaatgtttattttagatagtatatgtaaattttcagatatgctaattgcttaaaaaatgattaaagtgttggttccaagcaatgatactttagaaatttatttatcatcttgactttaaaaattatattataaatgacgtaactgtcaacagatatacttagtaatgaagatgtgtaatgtaattgtttaaaattgatttccaagcagattttatttatcatttaatttaaatagcaagtggaggtacaagtaatgaaatttggaaaaacaatcgcagtagtattagcatctagtgtcttgcttgcaggatgtactacggataaaaaagaaattaaggcatatttaaagcaagtggataaaattaaagacgatgaagaaccaattaaaactgttggtaagaaaattgctgaattagatgagaaaaagaaaaaattaactgaagatgtcaatagtaaagatacagcagttcgcggtaaagcagtaaaagatttaattaaaaatgccgatgatcgtctaaaggaatttgaaaaagaagaagacgcaattaagaagtctgaacaagactttaagaaagcaaaaagtcacgttgataacattgataatgatgttaaacgtaaagaagtaaaacaattagatgatgtattaaaagaaaaatacaaattgcatggtgaatacgcgaaagcatataaaaaggctgtaaactcagagaaaacattatttaaatatttaaatcaaaatgacgcgacacaacaaggtgttaacgaaaaatcaaaagcaatagaacagaactataaaaagttaaaagaagtatcagataagtatacgaaagtactaaataaggttggtaaagaaaagcaagacgttgatcaatttaaataattaatataatacagatggtaggaaacaactaatacagttcctattatctgtatctttttttattaaaacagaactttttcaaatggtttaacagtcccatttatttgtggtacaattagtaaggataaaatgaatttctatacaattatgggaaaggtatggtgaattgaatggctcctaagttacaagcccaattcgatgcagtaaaagttttaaatgatactcaatcgaaatttgaaatggttcaaattttggatgagaatggtaacgtcgtaaatgaagacttagtacctgatcttacggatgaacaattagtagaattaatggaaagaatggtatggactcgtatccttgatcaacgttctatctcattaaacagacaaggacgtttaggtttctatgcaccaactgctggtcaagaagcatcacaattagcgtcacaatacgctttagaaaaagaagattacattttaccgggatacagagatgttcctcaaattatttggcatggtttaccattaactgaagctttcttattctcaagaggtcacttcaaaggaaatcaattccctgaaggcgttaatgcattgagcccacaaattattatcggtgcacaatacattcaagctgctggtgttgcatttgcacttaaaaaacgtggtaaaaatgcagttgcaatcacttacactggtgacggtggttcttcacaaggtgatttctacgaaggtattaactttgcagcagcttataaagcacctgcaattttcgttattcaaaacaataactatgcaatttcaacaccaagaagcaagcaaactgctgctgaaacattagctcaaaaagcaattgctgtaggtattcctggtatccaagttgatggtatggatgcgttagctgtatatcaagcaactaaagaagcacgtgaccgcgcagttgcaggtgaaggtccaacattaattgaaactatgacatatcgttatggtcctcatacaatggctggtgacgatccaactcgttacagaacttcagacgaagatgctgaatgggagaaaaaagacccattagtacgtttccgtaaattccttgaaaacaaaggtttatggaatgaagacaaagaaaatgaagttattgaacgtgcaaaagctgatattaaagcagcaattaaagaggctgataacactgaaaaacaaactgttacttctctaatggaaattatgtatgaagatatgcctcaaaacttagcagaacaatatgaaatttacaaagagaaggagtcgaagtaagccatggcacaaatgacaatggttcaagcgattaatgatgcgcttaaaactgaacttaaaaatgaccaagatgttttaatttttggtgaagacgttggtgttaacggcggtgttttccgtgttactgaaggactacaaaaagaatttggtgaagatagagtattcgatacacctttagctgaatcaggtattggtggtttagcgatgggtcttgcagttgaaggattccgtccggttatggaagtacaattcttaggtttcgtattcgaagtatttgatgcgattgctggacaaattgcacgtactcgtttccgttcaggcggtactaaaactgcacctgtaacaattcgtagcccatttggtggtggcgtacacacaccagaattacacgcagataacttagaaggtattttagctcaatctccaggtctaaaggttgttattccttcaggcccatacgatgcgaaaggtttattaatttcttctattagaagtaatgacccagtcgtatacttagagcatatgaaattgtatcgttcattccgtgaagaagtacctgaagaagaatatacaattgacattggtaaggctaatgtgaaaaaagaaggtaatgacatttcaatcatcacatacggtgcaatggttcaagaatcaatgaaagctgcagaagaacttgaaaaagatggttattctgttgaagtaattgacttacgtactgttcaaccaatcgatgttgacacaattgtagcttcagttgaaaaaactggtcgtgcagttgtagttcaagaagcacaacgtcaagctggtgttggtgcagcagttgtagctgaattaagtgaacgtgcaatcctttcattagaagcacctattggaagagttgcagcagcagatacaatttatccattcactcaagctgaaaatgtttggttaccaaacaaaaatgacatcatcgaaaaagcaaaagaaactttagaattttaatacattttaaaagttaacgaagttagcgtattttagtctcattgattaaaatgaaatgtttaatttacgaaatcttaggagggcaaaaacgtggcatttgaatttagattacccgatatcggggaaggtatccacgaaggtgaaattgtaaaatggtttgttaaagctggagatactattgaagaagacgatgttttagctgaggtacaaaacgataaatcagtagtagaaatcccatcaccagtatctggtactgtagaagaagttatggtagaagaaggtacagtagctgtagttggtgacgttattgttaaaatcgatgcacctgatgcagaagatatgcaatttaaaggtcatgatgatgattcatcatctaaagaagaacctgcgaaagaggaagcgccagcagagcaagcacctgtagctactcaaactgaagaagtagatgaaaacagaactgttaaagcaatgccttcagtacgtaaatacgcacgtgaaaaaggtgttaacattaaagcagtttctggatctggtaaaaatggtcgtattacaaaagaagatgtagatgcatacttaaatggtggtgcaccaacagcttcaaatgaatcagctgcttcagctacaagtgaagaagttgctgaaactcctgcagcacctgcagcagtatcattagaaggcgacttcccagaaacaactgaaaaaatccctgctatgcgtagagcaattgcgaaagcaatggttaactctaagcatactgcacctcatgtaacattaatggatgaaattgatgttcaagcattatgggatcaccgtaagaaatttaaagaaatcgcagctgaacaaggtactaagttaacattcttaccttatgttgttaaagcacttgtttctgcattgaaaaaatacccagcacttaacacttcattcaatgaagaagctggtgaaattgtgcataaacattattggaatatcggtattgcggcggacactgatagaggtttattagtacctgtagtgaaacatgctgatcgtaagtctattttccaaatttcagatgaaattaatgaattagctgttaaagcacgtgatggtaaattaacagccgatgaaatgaaaggtgcaacatgcacaatcagtaatatcggttcagctggtggacaatggttcactccagttatcaatcacccagaagtagcaatcttaggaattggccgtattgctcaaaaacctatcgttaaagatggagaaattgttgcagcaccagtattagcattatcattaagctttgaccacagacaaattgatggtgcaactggccaaaatgcaatgaatcacattaaacgtttattaaataatccagaattattattaatggaggggtaaaacatggtagttggagatttcccaattgaaacagatactatagtaatcggagcaggtcctggtggatacgttgcagcaattcgtgcagctcaattaggacaaaaagtaacaatcgttgagaaaggtaatcttggtggtgtttgcttaaacgtaggatgtattccttcaaaagcattactacatgcttctcaccgttttgttgaagcacaacattctgaaaacttaggtgttattgctgaaagtgtttctttaaacttccaaaaagttcaagaattcaaatcatcagttgttaataaattaactggtggtgttgaaggcttacttaaaggtaacaaagttaacatcgttaaaggtgaagcatatttcgtagataacaatagcttacgtgttatggacgaaaagagcgcacaaacatacaactttaaaaatgcaatcattgcaacaggttcaagaccaattgaaattcctaatttcaaattcggtaaacgtgttatcgactcaacaggtgctttaaacttacaagaagtaccaggtaaattagttgtagttggtggaggatacattggatcagaattaggtacagcatttgctaactttggttcagaagtaaccatccttgaaggtgctaaagatatcttaggtggcttcgaaaaacaaatgacacaacctgttaaaaaaggtatgaaagaaaaaggtgttgaaatcgttactgaagctatggctaaatcagctgaagaaacagataacggagttaaagttacttatgaagctaaaggcgaagagaaaacaatcgaagctgattatgtattagtaactgtaggtcgtcgtccaaacacagacgaattaggcctagaagaattaggtgttaaattcgctgaccgtggattattagaagttgataaacaaagccgtacgtctatcagcaatatctatgcaattggtgatatcgttccaggtttaccacttgctcacaaagctagctatgaagctaaagttgctgctgaagcaattgatggtcaagctgctgaagttgattacattggtatgccagcagtatgctttactgaaccagaattagctacagttggttattcagaagcgcaagctaaagaagaaggtttagcaattaaagcttctaaattcccatatgcagcaaatggtcgtgcattatcattagatgatactaacggatttgttaaacttattacacttaaagaagatgatactttaatcggtgctcaagtagttggtactggtgcatcagatattatctctgaattaggtttagcaattgaagctggtatgaatgctgaagatatcgcattaacaatccatgcacatccaacattaggtgagatgactatggaagcagcagaaaaagctatcggatacccaatccatacaatgtaataactgattatctataaagattcagtcattaaaagctgtagcatatgctacggcttttttgttttaggtaaagtaatgtaaggaaattgatttgagatatcgttaacatgtgacatgcatgttatactagcgatgctaacaaaagaattgaaatggagggttcaacaatggaatatgagtatccaattgatttagactggagtaatgaagagatgatttcagtgataaatttctttaatcatgtagagaagtattatgaatccggcgtgacggcaggcgactttatgggtgcatataaaagatttaaagaaattgtgcctgctaaagcagaggaaaaacaaatttttaatactttcgaaaaaagtagtggctataatagttacaaagcagttcaagatgtaaaaactcactctgaagaacaaagagtaacagctaaaaaataattcgttcgaaattaacacaatttaataggattttttctttaaaactattgctaataaagctatattttgatacctttatcaagtgttaaacaaaatgtttgataaaagtaaacttaatatagcttttttaggtggaaaaataaatgaacataggtaataaaattaaaaatcttagaagaattaaaaatttaacgcaagaagaacttgctgaacgtacagacttatcgaaaggctacatttcacaaatagaaagtgaacatgcctcaccaagtatggaaactttcttaaatattatagaggtgttaggaacgacgccaagtgaattttttaaagacagtgaaaatgaaaaagtattatacaagaaggaagaacaagttatttatgatgagtatgatgaaggttatatattaaattggttagtttcaaagtcaaatgaatatgatatggagccattaatattaactttaaagcctggagcatcatataaaaattttaatccatcagagtctgatacgtttatttattgtatgtcaggtcagataacacttaatttaggcaaagagatatatcaagcacaagaagaagacgttttgtattttaaagcacgagataatcatcgtttgtcaaacgaatcaaacaatgaaacacgaatacttattgtagcgacagcttcatatttataggggggatcttatttggaaccgttattatcattaaaatcagttagtaaaagctatgatgatcttaatatcttagatgacatagatattgatattgaatcaggatacttttatacattattaggtccttcaggttgtggtaaaacaacaattttaaaattaattgcagggtttgaatatcctgacagtggtgaagtgatttatcaaaacaaaccaattggtaatttaccaccaaataaacgtaaagtgaatacagtctttcaagattatgcattatttccacacttaaacgtatatgataatatcgcttttggtttgaaattaaaaaaattatcaaaaaccgaaattgatcaaaaagtaactgaggcattaaaattagtaaaactttcaggttatgaaaaaagaaatattaatgaaatgagtggcggacaaaagcaacgtgttgcaattgcacgtgctatcgtaaatgaaccagaaatattattgttagatgaatctttatccgcattagatttgaaattgcgtactgaaatgcaatatgaattacgagaattgcaatctagattaggtattacatttatatttgtaacacatgatcaagaagaagcgttagcattaagtgactttctttttgtattaaaagatgggaaaattcaacaatttggcacaccaacagatatatatgacgaaccagtgaatcgatttgtagctgattttattggagaatctaatattgttgaaggacgcatggttagagattatgtcgtgaatatttatgggcaagatttcgaatgtgtcgatatgggtattcctgaaaataaaaaagtagaagtcgttattcgaccagaagatatatcattaatcaaagctgaagaaggattatttaaagcaactgttgattctatgttatttagaggggtccactatgaaatatgttgtatagacaataaaggttatgaatgggtaatacaaacgactaaaaaagctgaagtaggcagtgaagttggtctttattttgatcctgaagccattcatattatggttcctggagaaacagaagaagaatttgataaacgtattgaaagctatgaggaagtagacaatgcgtaatactaataaatttctcttaatcccgtatttactatggatggttatatttattattgtaccagttgtattactcatttatttttcatttttagatatcaatggacattttagtttcacgaattatcaacaaatttttactacaaaatatttgaaaatgtttgcatattcaattttatatgccgctttaataacaattattacgttggctatcagttatccagctgcctattatattactcgttcgaaatttcaaaatatcttattaatgataatgattattccaacatggataaatttattgttaaagacatatgcttttataggtttattaagtcatgatggcgtgattaatcaatttttccacttatttaatttaccatcattcaatttgttatttacaactggtgcgtttttagtagtggcaagttacatttatataccatttatgattttacctatatttaatagcatgaaagcaattcctaataatttattgcaggcctcaagtgatttaggtgccagtcctttctatacttttagaaaagtaatcatgccgttaacaaaagaaggtgttatgactgggattcaagtaacctttattccatcactttcattatttatgattacaagattaattgcaggtaataaagtcataaatataggtacggcaatagaggaacaatttttaacaattcaaaattatggtatgggatcaactatagctatattcttaattgtatttatggcattcattttaatcattacaaaatcatctaatgggagagggtgaatcatatgaaatggtatggaaagctgtatatcgggatacttttagcgattttatacatcccaatattctttttaatgttctattcattcaattcggctggtaatatgattcactttgaacattttacattagagcattatcaatcattatttcaaaatgatcatttaatgtcggtcatttttaatacgatagctgtagcacttttagcagcctcaatttctacagttattggtacatttggtgccattgctatttattatttaagaaataaaaagtttaaagtaactttactaacattgaataatgtcttgatggtatcatccgacgttgtcataggtgcatcattcttaattatgtttacaacgattggccattttactggtcttggtttaggattttggacagttctaatatctcatattgcattttgcatacctatagttgtgattatcgtcttaccacaactgtatgaaatgaataataatatgttaaatgctgcaagagatttaggagcgactgaaccacaattattaagcaacattattattcctaatattttaccttctattataggaggtttctttatggctttaacttattcactagacgatttcacagtaagtttcttcgttactggtaatggctttagtgtgttatcagttgaagtttatgctatggcgagaaaaggaattagtatggaaattaatgcgatttcaacattattgtttgctgttattgtattaggaatactaggatattatttgattcaatacgtgataaataagaaaaaactaatcaagcgaggtgtaaaataatgaaacgttttttacaactcattataggtgcattagttgtgggtatgctttgtcttactttaagtcattggtttaaatctaaagaacaagtgcatacaaatcaaaaaatttacgtatacaattggggcgaatatattgatccagagttaattaagaaatttgaaaaagaaactggcattcaagtcgtttatgaaactttcgattcaaatgaagcgatggaagccaaaattcgcaatggcggtacacattatgatgttgcttttcctagtgaatatacagttcaaaaattgaaaagagatcatttattgttaccaatagatcataataaggtacctaatattaaaaatttagattcagattatatgaatatgtcatttgataaaggcaataaatattctttaccttatttctttggaactgtaggtattttatataataaagaaaagtatccaaatgaatcatttgatagttggaagtcattgtataatcctaaatttaaaaaccaaattttactagttgacggtgctagagagattataggcatgagtttgaataaacttgggtataatcttaatgaccgtaattcgcaccatttaaaagaagcagagcgagatttaaccaaactagcaccacaagtaagaggtgtcgtaggtgatgaaattaccatgatgcttcaacaaaatgaaggtaacatagcggttgtttggagtggtgttgcagcacctctagtgcaagaaggggataaatataattatgttattcctaaagaaggatcgaatttatggttcgacaatatggtaattccaaaaacggcacaaaataaagagggtgcatataaatttatgaattttttattagatgctaaaaataacaagcaaaatacagaattcgtaggctatgcaacgccaaacaaggctgctcgacaattgttgcctaaagagattaaagacgaccatcgtttttatccgactaagaaagagcaagaacgccttgaagtttataaagatttaggacctgaagttttaagtgaatacaatgaaaactttttgaatttcaaaatgtcattaaaataaaatcataaatagtagttatttactgtatatttagttataataacgggataagtactataaggagttgtaacgaatgactggagaacaatttactcaaattaaacgtccagtaagtagattaactgaaaaagttctaggttggttatgttgggtgatgttattagtgcttactgtcattacgatgtttatagcacttgtttcattcagtaataacacatcgatagctaatcttgaaaatacattaaacaataatgcatttatccagcaattattagctggaaatggctataatacaacacaatttgtaatatggttacaaaatggtatatgggctattatcgtttactttattgtttgtttgttgatttcatttttagctctcatatctatgaatataagaatcttgtcaggtttcttattcttaatatcagcaattgtaacgattcctttagttttacttatcgttactttaatcattccgatattattctttattattgcgatgatgctatttataagaaaagataaagttgaaatggttgcgccacaatattatgaagagtataacggaccgatttatgattatcgtgaacctgtgtatgagcgcccccaaccgaaagatgattattatgatgtgcctaaatatgaaaaagaattggataaatcaaatactgtatatgatcaagaacaggaaagagataaatatgatcaatttcctaaacgtgcagttgaaagtgaatataatcatgatgagcgcactgaggaagaaccatcagtattatccagacaggctaaatacaaacaaaaaagtactgaagaactaggtattgaagatgatggttattatgcagaacctgaagttgatccaaaagaattgaaagcacaacaaaagcgagaaaaagctgaaattaaagctaagaaaaaagaaaaacgtaaagcttataaccaacgaatgaaagaacgtaggaaaaatcaacctagcgcagttagtcaacgtcgaatgaattttgaagagcgacgtcaaatttacaacaatgatatttctgaagaacgcaattcaagtgaagttaaggacaaaaaagagcaagaataaatattgatgatacccagattagtaagtagaggtcttttgcttattaatctgggtttttatatgaggttaatcatcgataacgtttaattaaagtgtttaggtgtcaaaattttaaatgacgatttctcattaccatacacctaaattatcatcaatctgaattcagatgtttattataaaaattagatgaaaaatatgttaatatacaagtaatttaatgtgcgtatatctataggctcgtagtatacttattaaaatattaaacaaagaaaggattttaagatgaatagaaaacctgaattaatcatggcttggattgcaaatagtattagtattatttatttattagttatggggctatcctatttttctttaaaaagtggtaatgcatcacaacgtgaagaattagcgaagcaattatctcagaacggtggcaatgtttctttagatatgcttcagacaacaatgggtgcattagcaattattttattaatttcaacactttatggtatatttgcgacaatttgtattaaagggcgtagaaaattatcgattatactttttgttatcgcgataattgtaagtttgatggctcttaatttaattgcaattgtcttatgggttatcgtgatgattatgttgatttctaaaaaagaatcaaaagaaactacacataaggacgatgagtatatttatcattaatatgttcatagcaaaaaaaccattaaaatgttaagttgttaattattagatacaaccaacattttaatggttttatttttaactttgtagttcttggaatgtttgaacgattaaatagacatttaaaatacttagaataataataagtgtccatgaaatgatattaacccatgttttattatagaaaggtcccatcaagtctttattactagtagctaattgtaatggtattaaacagaatggcagagcaatacttaaaaatacttgagagaatacaagtagttgctcaattttagctgcattacctttaaaaatgattaagcatacgataacaggaatgacagcaagggaacgtgtaattaaacgtcttaaccaatttggtatgtgtaatcttaaaaatccttccattacaatttgtcctgctaaagtaccagtaatcgttgaattttgacctgacgctaataatgcaactgcaaataatgtactcatgattgcacccattgttgcacctagtacaggttcagtttttaaggcgtgatataaatcatagaaaccacctaaatcgtcagcgttcgagttgaaaaatagtgatgctcctaacactaataataagcaattgactacaaatgcgattgataactgaatgttcgaatctatcgtagcaaatttaatcgcttgcgccttttcttcattgttatgtcttgagtatgttctagattgtacaattgatgaatgtaagtacaaattatgaggcataattgtagcgccaataatacctaatgcaatatagagaatgccgttatttgtaatgatttcactatgtggtataaatccatttaacacagcattcaactgtggtgatgaaatatagacttcaaatataaagatgaataacactgtgaaaattaatgtaccaacaatagcttcaatttttctaaaaccatatttcattataaatagtagtaaaaatacatcaagtacagttattagtgcaccgacgattaaaggtatgttaaataggagattaagagcaatagcactaccaataacctcagcaatatctgtagcgataattgctagttctgcaatgatccaaaagattatagcaataggtcttgataaataatgtcgtgtcatttgagctaagtccatacctgttgctattcctaatctcactgtcatgctttgaagtaacattgctgataaacttgaaataagaattacgaatagcaaagtatagccatattgggcgccaccttgcattgatgttatccagtttccgggatccatgtaaccaacagcgactaataacccaggtccaagaaatgataaaaatttctgtttatttgaactgcgatgatcgaatttaattgtattgtttatttcgtctaaacttaattgttcatttgttgaatgtcgtttattattcattttgactcacctctacttcttatggacaatataataacctaataaaatgttcaggtcaacctaaatttattttaatttttttaaaagtatgaattattatgttgaacgttcgatttaatattaagaaaaaagagcacgaaatcatggatgtgattacgtgctctattatttaaacaaagttatttatgcagaataaaatggtaagaactgatcgaaggtttcttctaaaaatgcaataaatgctttgtcactttttaatcttttatcttgtggtgtgattgcacgcgctataaagaattcaccttttttcacattgatggctctttgtatcgcttcttttaaatcatcatccgttaaatctttaataaatggtttatcaggtttcatatgatctaagcaaacacgataatcatcaggtaattgttgaatagctttaaattttctttcaaaaacttttgcacgtgttgctttatcttttgcttcatgcatgattccaaacataacaaacagttgatcttcaaacataccaatttggaaatgaggtaacattttatagcctcttttgcttgtagcaaaagcaacccatgtatctttaggaggattcacacttcttctagcatgttttgctacgtgaggataaaatgtttcaccagtttgacttgtaaagaagtcactaaaatattctcctaattcatggagttgtggtcgtatgtattcgtttaaagcttccattcgtgcgtctaagccttctacgttgaacgctttgaaatctttaggtttaaatgtatattttgtcatagagtacctcctgtatagtgtttaaaaatattgtagcatatgttttatcaattgcggcttaagacgctctcattaaaattagtattttcatttttatcataagaagttatttttataaaatgttgatgtataataaagatgttaggagatgatgttatggcactttatggatttgcccaaggacttattcaagaagcaggaattagaattaaacaattgatggagcaaaatttaacaattgaaacaaagtcaaatccgaatgaccttgttacaaatgtagataaagcaacagaagatttcatttttgatacaattttagaaacatatcccaatcatcaagtattaggtgaagaagggcatggtcatgacatcgatacttccaaaggtacggtatgggttgttgacccaatagacggtacattgaattttgttcatcaacaagaaaatttcgcaatttcaattggtatttatatcgatggtaaaccttatgcaggttttgtatatgatgttatggctgacgtcttatatcatgctaaagtaggggaaggcgcatatcgaggtagccaacccttgaaaccattgaatgattctaatctaagacaaagcattattgggatcaatccgaactggttaactaaaccaattttaggagaaatctttaaagaaattgttaatgattctagaagtgcaagggcatatggtagtgcagcgcttgaaatcgtttcagttgctacaggtaatttagaagcatatatgacgccaagacttcaaccatgggattttgctggcggattggttattttatatgaagtaaatggacaagcttcaaatttactaggagaaccattaacaattagtggtccaaattcaatcttagttggaaatcgaggtctccatcaagaaattagcaatgattatttagagccctaccatgatacgttaatacaattacatgaacaacgatttaaaagaaaatcaaaataattaccaaaagcgtaatatgtagtcctaacaattaggtaacatattacgcttttataccttaaataataaaaacacgcgccaatataaaaccatttaaatgttcataatgaacatgtgtggtcttaaatcaacgcgtgttattgtcgatataacttatagccaatcgttttctcgatattttttctttgtagtaaatccaattccaaaggttgcaacgagtaatataaatgttaaaatcatcattggtacatttgatgcaccaacagcaaaactaaataatactaagaaaacaacagctaatatagaaaatacccaaaagatatttttagattttttttgtttcatcctatccccaccttttgcttatcttttctcaattatatgatataataaaaaagttgtaattaaaagtgggattttacttaagaaagaaggaaactatttatatgactaataaaagagaagatgtccgcaatatagcaattattgctcacgttgaccatggtaaaacaactttagtagatgagttgttaaaacaatctggtatattcagagaaaatgaacatgtcgatgaacgtgcaatggactctaacgatatcgaaagagagcgtggaattacgattctagccaaaaatacggctgttgattataaaggtacacgtattaatattttggatacaccaggacatgcagactttggtggagaagtagaacgtattatgaaaatggttgatggggttgtcttagtagtagatgcgtatgaaggtacaatgcctcaaacacgttttgtacttaaaaaagcgctagaacaaaacctgaaacctgttgttgttgttaataaaattgataaaccatcagcacgtccagagggtgttgtagatgaagttttagatttatttattgaattagaagcaaacgatgaacaattagaattccctgttgtttatgcttcagcagtaaatggaacagctagcttagatcctgaaaaacaagatgataatttacaatcattatatgaaacaattattgattatgtaccagctccaattgataacagtgatgagccattacaattccaagtagcattgttggactacaatgattatgttggacgtattggtattggtcgtgtattcagaggtaaaatgcgtgtcggagataatgtatcactaattaaattagacggtacagtgaaaaacttccgtgtaactaaaatctttggttactttggattaaaacgtttagaaattgaagaagcacaagctggagatttaattgctgtttcaggtatggaagacattaatgttggtgaaactgtaacaccacatgaccatcaagaagcattgccagttctacgtattgatgagcctactcttgaaatgacatttaaagttaacaattctccatttgctggccgtgaaggtgactttgtaacagcacgtcaaattcaagaacgtttaaatcaacaattagaaatagatgtatctttgaaagtttctaacacagattctccagatacatgggtagttgctggtcgcggtgaattgcatttatcaatccttattgaaaatatgcgtcgtgaaggttatgaattacaagtttcaaaaccacaagtaattattaaagaaatagatggtgtaatgtgtgaaccatttgaacgtgtgcaatgtgaagtgccacaagaaaatgcaggtgctgttattgaatcattaggtgcacgtaaaggtgaaatggttgatatgactacaactgataatggacttacacgtttaatctttaatgtaccggctcgtggtatgattggttatacgactgaatttatgtcaatgacaagaggttacggtattattaaccatacatttgaagaatttagaccacgtattaaagcacaaattggcggtcgtcgtaatggtgcattaatttcaatggatcaaggttctgcaagtacttatgccattttgggacttgaagatagaggtgtaaacttcatggaacctggtactgaagtttatgaaggtatgattgttggtgaacataatcgtgaaaatgatttaactgttaacatcactaaaacaaaacatcaaactaacgtacgttctgcaacgaaagaccaaacacaaacaatgaatagaccgcgtattctaacattggaagaagcgttacaattcattaatgatgatgaacttgttgaggttacaccagaaagtatacgtttaagaaagaaaattttaaacaaaaatgttcgtgaaaaagaagcaaagcgtatcaaacaaatgatgcaagaaaacgaataatttaacataataaaagagaagctgagcgatgaaagttgcttagcttctcttttggcatataatatttgaaaaagtgtttaaatgctattatttcctgttactttcacattttcaaatttctaacttgtttattcagatattaatcgagcggatagtgttgcgcacgttgtttaggtgtgtctaatcgacttttacaatcatcacacataaatgttcgaataggattgtttttaagtcgtttagactcagttgtgcgctcatctataaatacttttgcatcacagataatgcattgcacttgtctcaaattaaatcacctcaatatgagttacatggttgattcgatatgaataaccatcttcttgattgtaaataaaactatctacaccattatcgctgtaaagtcgtttaccgtcttttgcaaattggaaaaataaatagggtaatagatctatcggtatatctaaatgatcatgctcatttgataatcgaatagtagttgcagagtcatgtggttcggaatgtttgaaaaatggtgtcatattaatgacaaatgaaccttctaacatggcacgttttttatattttatttctgaatttaaagtaggcggattagtttgtccttctaggatagcacgattccattcatgattatcttcaaagtcgattggttttgaaccatcaaatacacctttttctaaatcttcgatgctaacttttctatcatcgaaaatccaagtcgtactatctaatgttataggaaactttacggctcctttaatttgtatcattttcccactccctatcaatgtatatagcattattttaacacaaattgctaacgacacattttaaatctacttgctttttaatatttagtaagataaacttttagtaagacttgagaatttatatagagggggagcgtgtcatggcgaaacaagcaacaatgaaaaatgcagctttgaaacaattgactaaagatgctgatgaaatcttgcatctgattaaagttcaactagataatttaacattaccttcatgcccattatatgaagaagtactagatacacaaatgtttggacttcaaaaagaagttgattttgctgttaaattaggtttagttgaccgcgaagatggcaaacaaattatgttacgtcttgagaaagaactttcaaaattacatgaagcttttacacttgtttaaggtttaatatataagcatattaaaatggcgtgagatatcgacaattgagctgcgccgattttatatttatagtttaattactgattaaagtggctgttatgttgtcttcttgatgacatgtcagtcacttttattgggttttagcaattcacgatattaagtaaacaaatattctataaattacctcaagagacctgttaatatttgtgattatgactgtgtcatgtatataataagtaacatggatttttaaaattaaagtataaaacgaaatcatttgaagtataaattgtagaattggatgactgaatatatgaagaattttagaagtattttacggtatattggtaaaacctcaaagtttattgattatccgttattagttacatatattgtattgagtttaattggattagtgatggtatatagtgcaagtatggttccagcaactaaaggcacattgactggtggtatcgatgttccaggaacgtatttttacaaccgacaattagcatatgtcataatgagttttataattgtattttttattgcatttttaatgaatgttaaattactgagtaatattaaagtgcaaaaaggtatgattataactatcgtctcactattattactgacgttagtaataggtaaagatattaatggttctaaaagttggataaacttaggatttatgaacttacaggcatctgagttattaaaaattgcaatcatattatatatcccatttatgatcagtaaaaaaatgcctagagtattaagtaaaccaaaattaattataagtcctattgtattagcattaggttgtacgtttttagttttcttacaaaaagacgtagggcaaacattactaatattaattattttagttgcgattattttttattcaggaattggggtaaacaaagtcctaagatttggtataccagcagtgctaggattcttagtagtatttgtcattgcattaatggctggttggttaccaagctatttaactgccagatttagtacgctaacagatccattccaattcgaatcaggaactggataccatatttccaattcattgcttgcgataggtaacggtggcgtatttggaaaaggattaggaaatagtgcaatgaaattgggctatttaccagaaccacatacagattttatttttgcaattatttgcgaagaattaggtttaatcggaggattgctagttattactttagagttctttattgtatatcgtgccttccagtttgcaaataaaacatcatcatatttttataaacttgtgtgtgttgggattgccacatactttggaagtcaaacgtttgtaaacattggcggtatttcggcaacaattccattaactggtgtgccattgccatttatcagctttggtggatcatcaatgattagtttaagtattgctatgggattacttctgattgtaggtaaacaaatcaaagtagaccagcaacgaaagaaacaacaacaaaaagttgatataagaagacaatttaattaaaaaaatactagccaatatttagtacgagatgacttctgtcattaagcaatgctaaacattggctatttatatactctttgtcaaattggactgatgagttcaataacggaagttaggcaaccaaacaacgcttaacttcctttttgttttgatattacgagattactcatgattatcaaattttataaacaaaacaacgtataattataactaaattttatgactaaaaattactaaatgtggtggcgaaattagaatcatgatgataagataaagttatcgctattgataataaatgttgatgttttgcaattttatttttaattttttagagttgtagaaatcgaaaatgtttcacaacaaaaacgtgaactacctgttgttgcatagtcatttttgaaattattatttctgaagcggaggttttaattgtctcaagaatgttaaattttgaaaatttgaaacataactatagcaaaacagagcgctttaagataaaattttattatctaattagttagaaaattctaatagtttgaggagtgtatcgctattgaaacaaataaaaaagttacttgttgctaaccgtggagaaattgcaattcgtatattcagagcggcggcagaattagacatcagcacagttgcaatttattcgaatgaagacaaaagttcattacatagatataaagcagatgaatcctatttagttggaagtgatttaggtcctgctgaaagttatttaaatattgagcgtatcattgatgtagcaaaacaagcgaatgtggatgcgattcatcctggctatggatttttaagtgaaaatgaacaatttgcgcgtcgttgtgcagaagaaggaattaaatttattggtcctcatttagaacatttagatatgtttggagataaagttaaagctcgtacaacggctatcaaggcagatttaccagttattcctggtacagacggtccaattaaatcatatgaattagcaaaagaatttgcagaagaagctggtttcccgctaatgattaaagccacaagtggtggcggcggtaaaggtatgagaatcgttcgtgaagaaagtgaattagaagatgctttccatagagcaaaatcagaagctgaaaaatcatttggtaatagtgaagtttacatagaaagatacattgataatccaaagcatattgaagtacaagtcataggtgacgaacatggaaatatcgtacacttatttgaacgtgattgttcagtacaacgtcgtcatcaaaaagttgtagaagttgcaccatcagttggattatcaccaacattacgtcaacgtatttgtgatgctgcaattcaattgatggaaaatattaaatatgtcaatgcaggtactgttgaatttctagtatctggtgacgaattcttctttatagaagttaaccctcgtgtacaagtagagcatacaattacagagatggtaacaggaattgatattgttaagacacaaattttagttgcagcaggtgccgatttatttggtgaagagattaatatgccgcaacaaaaagatattacaacattaggctatgccatccaatgtcgtattacaacagaagatccgttaaatgatttcatgccggatactggaacaatcattgcttatcgttcaagcggtggctttggtgtacgtcttgatgctggagatggtttccaaggtgctgagatatcaccttattatgattcattactcgtaaaattatctacacatgcgatatcatttaaacaagcagaagaaaaaatggtacgttcattacgagaaatgcgtattcgtggtgttaaaactaatattccattcttaattaatgtaatgaagaataaaaagttcacaagtggtgattacacaactaaatttattgaagaaacaccagaacttttcgacattcagccgtctctagatagaggtactaaaacattagaatatataggtaatgtaacaattaatggtttcccaaatgttgagaaacgtccgaaaccagactatgaattagcatcaattccaactgtatcttcaagtaaaatcgcttcatttagtggtacgaaacaattgcttgatgaagtaggtccaaaaggtgtagctgaatgggttaaaaagcaggatgatgtcttactaacagatacaacctttagagatgcacaccaatcattattagctacacgagttagaactaaggatatgattaatatcgcatccaaaacagcggacgtatttaaagatggtttctcactagaaatgtggggcggtgctacatttgatgtggcatataatttcttgaaggaaaacccatgggaacgacttgaacgtctacgtaaagctatcccaaatgtattattccaaatgttgttacgtgcttcaaacgcagttggttataaaaactatcctgataatgttattcataaattcgtacaagaaagtgctaaagcaggcatagatgtctttagaattttcgattcattaaactgggtagatcaaatgaaagttgccaatgaagcagtacaagaagcgggcaaaatctctgaaggtactatttgttatacaggtgacattttaaatcctgagcgatcaaacatttatactttagagtattatgtcaaactagctaaagagttagaacgtgaaggtttccatattttagcgattaaagatatggcaggcttattaaaacctaaagccgcttacgaattgattggtgagttaaaatcagctgtagatttaccaattcatcttcacactcatgatacaagtggtaatggtttattaacatacaaacaagcaatagatgctggggtcgatatcattgatactgctgttgcttcaatgagtggtttaacaagtcagccaagcgccaattcgttatattatgcattaaatggcttcccacgccaccttagaactgatattgaaggtatggagtcacttagtcattattggtcaactgtacgtacttattattcagactttgaaagtgatatcaaatcaccgaatactgaaatttatcaacatgaaatgcctggtggacagtattcgaatttaagtcaacaagctaaaagtttaggtttaggcgaaagatttgatgaagtcaaagatatgtatcgcagagtgaatttcttatttggtgatatcgtaaaagtaactccatcgtctaaagtagttggtgatatggcactttatatggtacaaaatgatcttgatgaacaatccgtgattacagatggctataaattagatttcccagaatcagtagtgtcgttcttcaaaggcgaaataggacaacctgtaaatggttttaataaagatttacaagcggttattttaaaaggccaagaagcactaacagctcgtccaggtgaatatctagagccagttgattttgaaaaagtccgtgagttgcttgaagaagagcaacaaggtcctgttacggagcaagatattattagttatgtattatatccaaaagtatatgaacaatatattcaaactagaaatcaatacggaaacttatcgttacttgatacgcctacattcttctttggaatgcgtaatggtgaaacagtagaaatcgaaatcgataagggtaaacgattaattattaaactagaaacgattagtgaaccagatgaaaatggtaatagaacgatttactatgcgatgaatggtcaagcgagacgtatttacattaaagatgaaaatgtgcatacaaatgcgaacgttaagccaaaagcagataagagtaatccaagtcatatcggtgctcaaatgccaggttcagtaactgaagtcaaggttagtgttggtgaaactgtgaaagctaatcagccgttgctaattactgaagctatgaaaatggaaacaacaattcaagcaccatttgacggtgtgattaaacaagtaactgtaaataatggtgacacaatagcgacaggcgatttattaatcgaaattgaaaaagcaactgactaaaatgattaaaataaaacgagattacacaacaattgacgtgtaatctcgtttttacatggcttaggtttaattttaaatattgatataaaaaaccgtaattttaatgggcgtgccattaaaattacggtttgcttttttgttattgcttgtcacttcttactgatcgtaacattagcatgataaagtatgttgtcataccaaataaataagtgataaataatgcatggaaaagtgcgattatcaggttaacatttgtcataatagataatgcacctgtgataacttgtaatataacaagtataaatgcagctgtataaccataatgaacagtacgattatttggataatttttaacagcgtgaatataagtaatcataataatcgtaaacactataaaagccatgatacgatgcgtgagttgaacccaatcttgttctgaatgtggtacaagatcgtggaatggcaatggccaaccaccatatgctaaacttgcatccgcatgtctcactagtgcaccagtataaacaccacaataaatgatgattgccattaaccatgttaaacgtcttaatggctttttgatatataattcgtcagcttcatatttttgatctatagagaaaataatcaatgttattaaaaatacagatgagaaactgattaatgatataccaaagtgcaatgctaaaacgtaatcgttttgttgccaaataacagcggcagctccgattaatgcttgcaataataagaatccaacactaatgattgataaaggtttaatttctttaatatagcctatatgtttccatgcagtgataactaaccataagaccattaataaagacaaagctgaaacggctctatgacttaactcaataatcgtatcaataggaaagaattctggaatcaacgcaccatgacatagtggccaagaagaaccacaaccatcagctgatccggttttggtaactaaggctccaccaagttgtacaaatgtcatcattaacgttgctacgacacctaaccattttaaattctttttgccaaacaatttatacaccccatcataaaaaaacgcatcactgagaattagaattaatagccggatttgagatgatactataaattgacctgattgtaggatatgaaaagatgggatccaacgcaggaaatatgatttaattttacaagtattgtatgtggacgacataaaaagaacttaatcgtaatgatttttttattgggataattatgtaatccacgtttactcaaatttgaagcttaaatattaatctcttttagatgcatgattctacttattaaaattttctaacatatacattatagcaataaattaaatgttatttgtgtcacaaaattgacattttctcttgtcgttaatttgtcacattttaattttattaaacctagtctttttatgcaatctaagatatcataatcttatatgaacaaatttaaggagggggattatgagcaaagagcatactttgtcacaaaatattagcagagttaacttcaaagaattgcaacagataattaaaatgggacttgttcaaggtaacttaattccggcttttgcgggcgcatggctagcagttgtaatgacaaatcattccttcttatcatcaatacctcaaattttattaatgctatttggatctactttaattatgggtggcgcatgtgcgttaaataattattacgaccaagatattgatcgtattatgcctagtaaacaaaatagaccaactgtaaataatagaattacagatcaaaatttattactattaagttttggtatgatgttagttggagaaatttgtttgtttttattgaatataccatcaggcgtacttggtcttatggggattgtaggttatgtgtcttattactcaatatggtctaaaagacatacaacatggaacacagtgattgggagttttcctggagcagtaccaccactaattggatgggttgcaattgaaggacaaattagtttaacagcgattgcgctgtttttagttgtattttgttggcaaccaattcatttttatgccttagctattaaacgtaaagatgaatatgcacttgcaaatattccaatgttaccatcagttaaaggctttaaacgtacacgtgtcagtatgtttatctggttgattattttattgccagtacctttattactaataaatttaggtgtcgtattcgtagtgttagctacattattaaatttaggatggattgcattaggtttaacaacatttaagaaaaattcagatcaaacaaaatgggcaacacaaatgtttatatattcactaaattatttagtgatctttttcgtgttagctgtaattgtttcattacttactttgatctagattaattaagttaggatgaaaaatatgggcgttccaattttaccaacgattagtacgacatgtattgtcattagtgcaattttaattgccattggttggagacttatttggaaaagggaaataaataaacacaaaaatgttatgttagctgcagctgtttttgctttaacttttttcttaatctatgcaagtagaacgatttttatcggtaatacagcatttggcggaccagcatcaattaagaaatattatacgattttcttatttttccacattaatttagcaacaattggtggtattctaggcctagttcaaattattactgcatttaaagataaatataatgtacaccgcaaattcgggccattcgcttcagttatatggttctgtactgcaattacaggtgtagcagtttacttattattatatgtattatatccaggtggagaaacgacatcactgattaaagcaacatttggtcattaatatgcttatacaaatgatactaatctgataaggcaatttgttttatcaggttttttgatgaagaatagtcggacagttgatggtattcatttgataccttaactgtccatttttttatacatattttaatcttaataatgaaattcaacctgaaaacataaagataggttatgatatagagtgtagggaaaatctttatgacgttaaaattatgcctgaagatgattttgttttatcgaaacgacacagttatgtcagtgttgaaaatttgctaattaatgtgttgttttttacaatagtattaatactttttaggtggttgattgatgaaaaagttaattataagagtcgtcggtgtattatttttagttggatttttaatatatcttttttattcaccgagattaaaatttgatgtattagagaacccgaataaaggtaataaagtaaatagatctgaacaggtgaataaatcaaataaccatgctgaaaatccaaagcctaaagaaggtgttggtacatgggtaggtaaagatattaaagtgcttacttctaaatttggacaagcagatcgtgtctacccttttagagatggttacaaaaattatgtgtttaaagacaaaaacagttattacattgtttcaactaaacgtgaagaaatcgtttcagtgtatgctacaggtgagaaagtcaatgttagtccgttaaaaataggacaacattctgcagaaatttttaatcatacaagtattaatccagaaccttcctttaaagttgatggtaaaaaatatgaatttgaactttcagatgaagatttaaaaacacaaacactgattaaatatggcgacatatatgcacaagtgtattctgatcaacaatcgaaaaaggtgctaagtgtacgatttttaacaaaagaaatgttagcagatattgaaccttatcaattaaattctaattctacgtcagaagagcataataagcgtccagttgagcaaaatccaaatcaattaatttctctttatgaagtaacgaatgaaatgagaaaattaaaaggattaaaaccattgaaaatcaatagcgatttagcacatattgcatctaataacttatatgaagcgacctctaatggttctgatagtgttgaatttacagaggacgcattaagagggcaattagataaaaatcacgttacttataaaacaactgctcaaaatgttggttatgcgtttaatgatgtaccaacattaatccatagttggatgaattcagatatacatcgatctcgtctattaaattcaaaatacgatgagatgggtggagatgtaatgagagattattattcactaattttcttagaaaaataacaatgaggggtatttatgattaatgaagcttcactagcgatattagatgatattgatgaactagctgatatgatagttgcatcagatatttatgcatcatttgagcaagctaaacaggcgctcgaaaacaatgacgaagcacatttactttatcaatcatttttaaaatcaaaagagaaatatgatgaagtaatgcgtttcgggaaatatcatcctgattataagaaagtcatgttagagacaagacaacgcaaaagagcatatgagatgcttgacgttgtgatgcattacaaagctagggaaatggcacttcaacatttaattgatgaagttgttacgaaaattgcgtacgctgtttcagagcatgtcaaaatagaaacaggtaatccattctttcaaacatcacatagtggttgtgcgacgggcggatcctgtaattgttcattataaaaaacatcgagtcagaaaaaggtggttattgaaaccactaactagcatctgactcgatgtttttatttattcgggattgtttgtttgaattgttgtgctaaatctggtcgatctgtcacaatcgtgtgtgcacctttttggtataaatcattcatcagatctatactatttacgccataatagcctggaatgatattcatatcatttaaccatttgataaaacgagatgaagtcaaatcaatgcctttaaaatgagtaggcatttggaacgtttgtgctaatggttggtagtacctaccacctaataaatgatattttaaaaatgcttctgtaacttcctgttggctagcaccaattgcgacggatccttgtgcaattttattaaaacgaacgatttgttctttataaaaacttgtcacaagaacgcggtcaaatgcttgattttctgcaattgtatcaaacataatttgtggtgcgattgagccttcataggattcaggagcatcttttaagtctacgtttatatacatatcaggatattgcttcagcaactcatcgaaggttagtatagttgtgtgtgcatgaccacgatatggtgttagtccattgatatctttgaagtgataagctgcgtctaatttctttaattctgctaatgtgtgggcactaacttttccagagccgttcgtcgttctatcaacagttgcgtcatgaaaaacgataagctgttgatcttttgtgagtctcacatctgtttcaaagccatcaacgcctaattgtttagcatagtcaaatgcaagttgcgtttgctctggtcttaaagccataccaccgcgatgcgcaaatatatatggtgcattgcctttgaaaaaagcagggatggtttgctttttagtaatcactttatttttattgatcattaatagactacttaaaaatccagcaccgactagtaccgcatttaaaatgtttctgtttacttttttcatagaaaattcctcctcgtttacttttatagcttaacaaaatcatagttctgactacagcgaaatgtgtggttaatcatatagtgatgctcttgagaattgaattaatataatgatgtttaatataatctaaatacatttatcgagcaattacataagacataattaaggtagcttaatattttaaaattaataaagacatgatatgattaatgctgaaaataaatggagtgaggtttaaatgaatttaatcccaagaactagtattgtagtttatttaaaacatatgaaacatgaacgacaaatccgaaaatatggacatatcgttcattcaaatagagatcgtaaatttgtaattatgtatgtgaatgagcaggatgttgatcaaattgtacataaactaatgcaacttaaatacgttagacacattgatggctcaccatataaatacttaaagaaaacttacgaaaaagagaaacacgaaatatataattaatattattgaagttctggtatccatttttggagccttaacacactaattaaataattataatataacgataaatcatgaaatgcttgagggggctgtacatcgatacctaaaattggtatgtcgaatttttcagcacaatcattaatcatttgaaactttttatttgaatctggatatggatatttaatagcgttaatcatgatataaaatgcttggaaatgattgccagttgtagggttcataatgattgctacagatgactttttattttcagcttgtggtgaatgaaaatagataattttatcaatacgttgatggttatattcaatcatcgtcatgaattcgaacaaatctgttagaccttcaccaagtgtaataaatgtttgtttcattggtttatcattctcctttttctcaataaattatattaaataactaaatgaattggaagtgtgaacaacatgcgcgtcattgcaggtaaacataaaagtaaagctttagaaagtatggaaggccgtaatacgagaccaactatggataaagttaaagaaggtatctttaatagtttatatgatgtgtcaggtataggtttagatttatttgcaggaagcggggcgcttggaatagaagcactctctcgaggtatggataaggtaatctttgttgatcaaaattttaaagctgtaaaagttattaaatcaaatcttgcgaatttggatttagaggcacaatctgaagtttataaaaataatgcagatagagctttaaaagcattgtcaaaacgtgatattcaatttgatgtcattttcttagatccaccttataataaaggtctcattgataaagctttaaaactaatttcagagtttaatttattgaaagaaaatggtatcatcgtttgtgaatttagcaatcatgaagaaatagactatcaaccgtttaatatgattaaacgttaccattatgggttgacagacacattgttattagaaaagggagaatagcatggaacatacaatagcggtcattccgggtagttttgaccccattacttatggtcatttagacattattgagagaagtacagatagatttgatgaaattcatgtctgtgttcttaaaaatagtaaaaaagaaggtacgtttagtttagaagagcgtatggatttaattgaacaatctgttaaacatttacctaatgtcaaggttcatcaatttagtggtttactagtcgattattgtgaacaagtaggagctaaaacaatcatacgtggtttaagagcagtcagtgattttgaatatgaattacgcttaacttcaatgaataaaaagttgaacaatgaaattgaaacgttatatatgatgtctagtactaattattcatttataagttcaagtattgttaaagaagttgcagcttatcgagcagatatttctgaattcgttccaccttatgttgaaaaggcattgaagaagaaatttaagtaataaaaataacagtattttaggtttatcatggtttacaatcctaaaatactgttttcatttgttaacgatattgctgtatgacaggcgtgttgaaatctgtttgttgttgcccgcttattgcattgtatatgtgtgttgctttgatttcatttgtgaagtaatgtgcattgcttttgttaatattggttatatattgtctttctgggaacgctgtttttaaatgctttaaatattgtctgccacggtcgttcatcgctaatactttaactgcgtgaatgttactcgtaacatctgtaggtttaatgtttaataatacattcattaacagtctttggatatgcgtatatgtataacgctttgtttttagtaattttacaaaatgatgaaaatcagttgcttcataaatgttagatttcaaacgattttcaaaaccttcagtaacagtataaatattttttaatgaatctgtagtcatagctatgatttgatatttcaaatatggaaatatttgatttaatgttatatgaggtgttacgtacaagtgttgaatatctttaggtaccacatgatgccaatgatcatcttgactaatgattgatgttctaatagatgtaccacttgcaaactgatggtgttgaattaatgaatcatgatgttgagcattttctcgtttgatagaaattgcattgatgtttttagcatttttagcaattgctttcaggtaactaataccaagtatgttgttaggacttgctagtgcttcatgatgctctaataattcgctaatgatacgagggtagcttttaccttcttttactttttgtgaaaaggattcagattgttcaatttcattaatgctgtgtgctaattgctttaatgttttgatatcattattttcactaccaaatgcaattgtatcgacactcatataatctgcgactttaactgctagttcggcaaaatgatcgccagatgataaactggcagttgctggtagttcgataactaaatcagctgttgataatgccatttttgcacgagtaaacttattatagattgctggttcgccacgcatgacaaagttaccactcattattgcaatagtaacgtcagcatttgtaagttttttagattgattaatatgatattgatgcccattatgaaagggattatattctgtgattaagccaacgcttttcatttgcaattcgtcctttcggtattcattattaatattgtaacagaacatgatatgttaagaaaaaatcttgacaacttgttcttagaaagttaaaataaattttgtgcttgttagaggtgaagccatatgaaatggtcaattacgcaattaaggaaatatcaaggtaagccatttgaatttgatcaaacggtgagttttgacaatttaaaagaatcattagatttaattgatttatctccaattacaatccaaggtcagttaaccattaagtcaacagaagtcgttgcggatattcacattactggaacgtatacaatgccttgtgcacgtactcttgtaccagtaaaagtcccactagatgtaactactacagaagtatttgatttagaagggtacaatcagtataacgatgatcaagatgatgtagatgaacactatcacattattaaagatggtatggttaatcttcaggatattgtcgaggatatagttattattgagaaaccaatgagagcttattcagagcaaagtgaccaaatgttgacagtaggtaatggttgggaagtaatcgatgaggatcaattagatgagcttgctaaacagcaagaacaagatgattcagaatcacgacaagttgatccaaggcttcaaaaattacaacaattatatgataaagagcaataagtagtttaattaatgatataatgttgttaattaaactaacatttagtatttttcgtttataatctaaggaggatatatcatggcagtaccaaaaagaagaacttctaaaactagaaaaaacaaacgtcgtacgcatttcaaaatttcagtaccaggtatgactgaatgcccaaactgtggcgaatacaaattatcacaccgtgtatgtaaaaactgtggttcttacaatggcgaagaagtagcagctaaataattttagttactcaatataaaaagtcccgcttaaaatgattgttttaagtgggactttttatattgcgaaaaataattggcgaacgaggtaactggatacctcatccgccaattaaaatttgttaatttaataattaaatataaagacgatttattagtttttacgttttctaggtaatacgaatgcaacgatgctacttaaagctagtaatgccattaatggtaatgtcatatctttatttgattcttcaccagtttgtggtaatgattttgctttattttcttgtgtatttttattgttttggctttgagtgtgtccatcatttgtgtttttaatgtttgctttttgtaatggagcactatcttttgcttcgctagaacctgctgaagtttgaacaacatcttttgttgtttttgatgaagcagttgttggttttgcaacattttgagtcgtagatactaccttagttggagttgtactacttgattctacttcacctttagttggttttgtagcaggcgttttgtctttacctgactcactagatgcgtcattttctttttcaacacttggtaattgtttattgtcatctttttggctgtcttgtttttgtgattctttttcaacaggtgatggtgttggtttgctaggcgtagctggagtagcttccttcttagctgagttatcttgttgttcttttttgttagatttatcggtattggcttttgtaaatgcttctttatcaacgattctgacatggtattgtccatcataatcaatcgtttttacgtgaactttaacgatagcatcatatagagttttaccttcaacatatgggaaaataattgttctagtattatttttagcatctttgcttatagttctaacacgttgaccttcaaccatgaaatctttccagtaatcgtcattagtagtttccatgaccatatattttttgccgttaagcatacctgttttaatagggtgtttaacaaaagtatccatcatagattcgttattctcaacactttcataaacaacatattttgtatcttgtaaatcagtcattttttcatttgttggttgtacattttggaattcagtaatagctgatttcacttgctcatctaaagctttctttgtatcctctaatttcttcttgtactcagcctttaatttttcaggaagtttatcttgaattttatttaattcataaacttgtctttctagtgttttcgcttttttatatggcgctaataatttttcagctttataatcttcttcagttttgaatttatctgcactgttataaattggttgtgcgaattccattaatgtgtaatcgtatttttcttctttgttattgaagtgagttgaacttacaattttaacggcttttgttccatttgaaacagagaagcgaatgtaagcgtaatctttaacagtatcgtatgatactaatttaattggcaactttttgtcaccttcataaacttcaaattttctccaaaattgacctgattgtaatcctaattcaatttctggttttgaatcagtgaaaataactctagcaggtttaacagagctggcataatgataaaattgttgctcaccattttcttttttcatttcaaaatcaattggacgagagtttggtgcgctatgatctttatcttttattgcagggtttttaatcgcttctctaagttcctgattcaaaataggatatgtattgttagtggcttttgctgctggtttaactgcttttgtttccttaggggctttaacttctttaacttctttagcttcttttgtttcagaagtaggggcctcaacttctttattagatactgagacagcattagctactggtttagtttctggagctttttcagatgttgttgttggacttgcaactgcttcagtttttggttgtgcttctgtatttgtaccacctgtttcttcagctgctgcttgtgcttcgccatttgacattaataataaaagtgtactaatcgctacagatgcaacgcctagtgatgactttctaattgaataaaatgatttaaattctttttgctgtttgttcatgttgtagaaacaactcctaattgtatattatcaactgataatcattatcaattgattacttgtattgtacattgaaatggtagttaattgcaacattattttataaaaaaataacctatgttatagattatgaaatatctatgacataggttaaataaaatttaaaataaaaaatatattaagttatgagtgtgacgatgatttatttagattcttttcttttgaaaagtaataaagataatgaacctaaaagggcaagtgttgcgaaggcaactgtgctaataaagttatcaactgaagttaaaccagtttttggtaattctttagctttagatgcttgtttaggcgtttcgttatgttttgtaactttgttagtttgttgtgatttattatcacttacagcttgattgttgctttcagatttcgctgttgcaacatctttaacaggtgtttgaactttattttgttcttgagcagtttgtgctgttttaactgtatgagcagtttgtgttttagtttgatcttttgttgtgtcagtacttacaactttagtagagtgattgtcttcaactttgcttgttgtagttacagtaggtttaactttttcaactttaggttgaactggtttagtttgctcagtaggtgttttaggttgagctggttttggttgaaccggtttaacattgtttggttttgctgcgtcagctaatgtaggaattgctttttcaaattccaaatgcgtagtatatctatgattgtaattaatttgtggcacgacaatatgtactttagtagttaagctcttatatccaggttcaactgcaacattgattgttctagtatccgcttttttattatcgttaacaacagttgttgctaattcttgattgtttgcattgtaaaatttgtattctttccagaatgatgcattgtttaacacggtttggaaataatatttattattttgtttaattactttaccagggtgttgcatatagtcatccatgtgtgacttctctgaagagccatctttttgcacttggaaattaattggttgtgatgttgcttgagaaacttgtgtgctttgattattagttgcgttcgtagcttctgttgccgcattgacttgttggctgtctgcgcctatgtatacaagggaacctaaaatgatagatgctgtacccattgtaatctttttcatagctgatgaacgttgttctgattgatacttactgtttaaataatgttttgtcatgttgttttcctcctaaggatacaaattatgtgttgttatatgagatgattaaccattgcaattgataatggttatcaattatactagcacatctatttccgtataacaataataaattgattataaaataaatattgacaatgataatcattattatttatgattttactaaagacttaaaagcaatcataaaaaggaggattatgttttgaaaaatattttaaaagtttttaatacaacgattttagcgttaattatcatcatcgcgacattcagtaattctgcaaatgccgcagatagcggtactttgaattatgaggtttacaaatacaataccaatgacacgtcaattgctaatgactattttaataaaccggcaaagtacattaagaaaaatggtaaattgtatgttcaaataactgtcaaccacagtcattggattactggaatgagtatcgaaggacataaagaaaatattattagtaaaaacactgccaaagatgaacgcacttctgaatttgaagtaagtaagttgaacggtaaaatagatggaaaaattgacgtttatatcgatgaaaaagtaaatggaaagccattcaaatatgaccatcattacaacattacatataaatttaatggaccaactgatgtagcaggtgctaatgcaccaggtaaagatgataaaaattctgcttcaggtagtgacaaaggatctgatggaacgactactggtcaaagtgaatctaatagttcgaataaagacaaagtagaaaatccacaaacaaatgctggtacacctgcatatatatatgcaataccagttgcatccttagcattattaatcgcaatcacattgtttgttagaaaaaaatctaaaggcaatgtggaataatgagaaatgttaaacaaattgctacaaaatctattatagctattattagcttatgtatacttacatatacaacaatgattggtagcgtgttggctgatgagataaaatatccatcagccaaatttaatcaacctgaagcaaaagataaaacagaattaactacatcaatttttgatgaaaagataaaagagaataaagcgttagagttactaatttttaatcaagaaaataaaaatgtaactgaggaacaacaactagttgacgaaaaggcgcaattgatttcagatatgactggtaaaatttacttgcaagtaaagctaaaaggtcaaatagataaagaacaacttgtttttcaaaatgacaaaaatgaagaatttccttttgttataaaagatgaaaaggatgacacaatagtaagaattttaattgaacagcatatggataaaatcaatatgcatgttaaaacgttggctgaaaagaaaaatctagataacaaagaaatggtgtattctattcattttaaagagaaaaaagtacaacatgatgatgcaaaagaagtgccttcaaaacatcaaaatcaagaaaataatcaagatcagcttaaaaaagatattgatgacaaaaaagatagtcaaaaatcagatactaaggaaagacgtactagcctttttactgaaaaaggattaaatgatattcctgtacaaaaagataaagtgcaacaagacagtaataaaaagattgaaaatgagcgacctaaagcatcaggtacattaaaagttgaaaatagccctccaacaataaaaaaggttgaaaataatcacaaagagcaaccgaaacataaagatgaaaaatcaaaaaaggaaaagaaaaaagtagttgaaaaagaaaaagcgttaccagcttttaatagagatgatgatagcaagaatagtagtcaattatctagtgatattaaagaacttgatgaaccaaatcataaaaagcaatatatgttatttgcagctggcattgtgttagcaactattttacttatttcggcacatttatacagcagaaagagaggtaaccaagtttgagaatcataaagtatttaaccattttagtgataagcgtcgttatcttaaccagctgtcaatcttccagttctcaagaatcaactaaatccggcgaattcagaatcgtaccaacaactgttgcattgacaatgacattggacaaattggatttaccaattgtcggcaaacccacgtcatataagacattgcctaatcgttataaagatgtaccggaaattggtcaaccaatggagccgaatgttgaagctgttaaaaagttaaaaccaacacatgttttgagtgtgtcaacgattaaagatgaaatgcaaccattttacaaacaattaaatatgaaaggctacttttatgattttgatagtttaaaagggatgcaaaagtcgattacacaattaggtgatcaatttaatcgtaaagcacaagcaaaagaattaaatgaccatttaaattctgtaaagcaaaaaattgaaaataaagcagctaaacaaaagaaacatcccaaagtattaatattaatgggtgtaccgggtagctatttagtagcaactgataaatcatatattggtgatttagttaaaatagcaggtggagaaaatgttattaaagtgaaagatcgtcaatatatttcgtctaatactgaaaatttgttgaatatcaatccagatattattttacgattaccacacggaatgcctgaagaagttaagaaaatgtttcaaaaagaatttaaacaaaatgatatttggaaacattttaaagctgtgaaaaataatcatgtttatgacttagaggaagtgccattcggtattacagcaaatgttgatgctgataaggcaatgactcaattatatgatttattttataaggataaaaaatagtgagttgatatgatgataaaaaataaaaagaaactactatttttatgtttgttagtcattttaatcgcaactgcttatatttcgtttgtaaccggtacaattaaattgtcatttaatgacctatttacaaaatttacaactggtagcaatgaagcagtggattcaatcattgatttgcgattgccacgtatattaattgcattgatggttggcgcaatgttagcagtttctggagcattattacaagcagcactacaaaatcctttggcagaggcgaatatcattggcgtttcctcaggtgcacttataatgagagcactttgtatgttgtttattccacaattgtacttttacttaccattattaagttttattggaggtttaataccatttttaataattatattgttgcattctaaatttagattcaatgctgtaagtatgatattagtaggtgttgcgttattcgtattattaaatggtgttttagaaattttaactcaaaaccctttaatgaaaattcctcaaggcttaacaatgaaaatatggagcgacgtatacatattagcagtatcagcattattgggattaatattaacattactattgtcccctaaattgaatttactaaatttagacgacatacaagcgcgaagtatcggttttaatattgatcgttacagatggttaacaggtttattagcagtatttttagcaagtgcaactgttgcgattgttggacaactagcctttttaggtattattgtgccacatgtggttagaaagctagttgggggcaattacagagtacttattccgttttctacagttattggtgcatggctattgttagtggctgatttattaggacgagtgatacagcctcctttagaaattccagccaatgctattttaatgattgtcggtggtccaatgctaatttacttaatttgtcaaagtcaacgaaatcgaatctaaaacggtacaacaactggtttagtgatgactgaagaaacgtcgttaataaaagaggatttttatgagaatgaagcgatttttaactattgtacaaattttattggttgtaattattatcatttttggttacaaaattgttcaaacatatattgaagacaagcaagaacgcgcaaattatgagaaattacaacaaaaatttcaaatgctgatgagcaaacatcaagaacatgtgagaccacaatttgaatcacttgaaaaaataaataaagacattgttggatggataaaattatcaggaacatcattaaattatccagtactacaaggtaagacaaatcacgattatttaaatttagattttgagcgagaacatcgacgtaaaggtagtatttttatggattttagaaatgaattgaagaatttaaatcataatactattttatacgggcaccatgtcggtgataatacgatgtttgatgtgttagaagattatttaaagcaatcgttttatgaaaaacacaagataattgaatttgacaataaatatggtaaatatcaattgcaagtatttagtgcatataaaactactactaaagataattacatacgtacagattttgaaaatgatcaagattatcaacaatttttagatgagacaaaacgtaaatctgtaattaattcagatgttaatgtaacggtaaaagataaaataatgactttatcaacgtgcgaagatgcatatagtgaaacaacgaaaagaattgttgttgtcgcaaaaataattaaggtaagttaaacagaaaagaggataattatgaaatttatggcagaaaataggctgacgttaacaaaaggaacagcaaaagatattatagaacgattatacacgagacatgggattgaaacattagaaggctttgatggcatgtttgttacacaaactttagaacaagaagattttgatgaagtgaaaattttaacagtttggaaatcaaagcaagcttttacggattggttaaaatctgatgtctttaaagcagcgcataaacatgttagaagtaaaaatgaagatgaaagtagcccgattatcaataacaaagtaattacatatgatataggctatagttacatgaaataattgaatttaaagaggttgcagtacttgttatgacaattggtattgttagcttttgtaacgaccatacatgataccgatgatggtcgtttttttaatgaacacaaacatgctaacaacaaattgctaaaacatagtttgatttgaatgtgctttgaaaataatcatcaattatatcattttgatttattttgaagaagaaaagaattaataatgatattttggggcgtatgatttatagtagtagtatcgataaaagaaatttatgcaatttgaaatattatgagtgataaaagcgattaattaatattaactatacaatcaaatgttttcatcttattaatgattaatatttttatttttaaaaataaagcgaggagctatcaatggaacaaattacttctgcacaaaataatagaattaaacaagcgaacaagctaaaaaagaaacgtgagagggataaaactggattagctttaattgaaggtgtgcatttaattgaagaagcttatcaaagtggaattgtaattacacaattatttgcaattgaaccggcaagattagatcagcaaattatcgcatacgcgcaagaagtttttgaaataaacatgaaagttgctgaatctttatcaggtacagtgacaccacaagggtttttcgcaatcattgagaagccgcattatgatatttctaaagcacaacaagtattgctcatcgatcgtgttcaagatcctggaaatttaggcacattaattagaactgcggatgctgctggaatggatgctgtaataatggagaagggtacgacagatccttatcaagataaagtgttgcgagcgagtcaaggtagtgttttccatttgccagttatgacacaagatctcgatacgtttattactcaatttaatggtcctgtttatggtacagcacttgaaaacgcagtggcatacaaagaagttacttcaagtgattcttttgcattactattaggtaatgagggagaaggtgttaatcctgaattattagcacatactacacaaaatttaatcatacctatttatggtaaagctgaaagtttaaatgtagcgattgcaggtagtattttactttatcatttgaaaggttgaccgtgttgaaagttttccgatataattataattaattgtttaacagaacatttctacgtgaatgcatacacaattgaatataaaccaataaaaaggcatggacatttatataaataattgttttagggagaataatcgtgactgcaagttattccaattatttaaagtcttttcacctttttggttacttaaagagatttaagtcggaaagacaatccgttatcaatattaaacaagtgtatgcttaggcataaatttgggtggtaccacggaaatgactttcgtcccttatttttaagaggatgaaagtcattttttagttaaacaacaaatatgatcaatagaaaatgaatagttcgaatagggaggtcagtgacatatgtctgaacaacaaacaatgtcagagttaaaacaacaagcgcttgtagatattaatgaagcaaatgatgaacgtgcactgcaagaagttaaagtgaaatacttaggtaaaaaagggtcagttagcggactaatgaaattgatgaaggatttgccgaatgaagagaaacctgcgtttggtcaaaaagtgaatgaattgcgtcaaacaattcaaaatgaattagatgaaagacaacagatgttagttaaagaaaaattaaataagcaattggctgaagaaacaattgatgtatcattaccaggtcgtcatattgaaatcggttcaaagcatccattaacacgtacaatagaagaaattgaagacttattcttaggtttaggttatgaaattgtgaatggatatgaagttgaacaagatcattataacttcgaaatgctgaatttacctaaatcacaccctgcacgtgatatgcaagatagtttctatattacggatgaaattttattacgtacgcatacatcaccagtgcaggcacgtacgatggaatcacgtcatggtcaaggtccagttaaaattatttgccctggtaaagtgtatcgtcgtgactctgatgatgcgacacatagtcatcaatttacacaaatcgaaggattagttgttgataaaaacgttaaaatgagtgatttgaaaggcactttagaattgttagctaagaaattatttggtgctgatcgtgaaattcgtttacgtccaagttacttcccattcactgaaccttctgtagaagttgatgtgtcatgttttaaatgtaaaggaaaaggttgtaatgtgtgtaaacacacaggatggattgaaattttaggtgctggaatggtacatcctaatgtattagaaatggctggttttgattcttcagagtactctggatttgcatttggtatgggaccagaccgtattgcaatgttgaaatatggtatagaagatattcgtcatttctatactaatgatgtgagatttttagatcaatttaaagcggtagaagatagaggtgacatgtaatgttgatatcaaatgaatggttgaaagaatatgtaacaatcgatgattctgtaagtgatttggcagaacgtattacgcgcacaggtattgaagtggatgatttaattgactacacaaaagatatcaaaaatttagttgtcggtttcgttaagtcaaaagagaaacatcctgatgccgataaattaaatgtttgccaagttgatatcggagaagacgaacctgtacaaatcgtatgtggtgcaccgaacgttgatgcaggacaatatgtcattgttgctaaagtaggtggcagattgcctggtggtattaaaattaagcgtgccaaattacgcggtgaacgttcagaaggtatgatttgttcgttacaagaaattggtatttcaagtaactatataccgaaaagttttgaatcaggcatttatgtttttagtgaatcccaagttccaggaacagatgccttacaagctttatatttagatgatcaagtaatggaatttgatttaacgccgaatcgtgcagatgctttaagtatgataggtactgcttatgaagttgcagcattatataatacaaaaatgactaagccagagacaacatcaaatgagcttgagttatctgcaaatgatgaattgactgtgacaattgaaaatgaagataaagtaccatattatagtgcacgtgttgttcacgacgtgacaattgaaccttcgccaatttggatgcaagcacgcttaataaaagcgggtatacgtcctattaataatgttgttgacatttcaaattatgtgttattagaatacggtcaaccattgcacatgtttgatcaagatgcgattggttcacaacaaattgttgttcgtcaagctaatgaaggcgaaaaaatgacaacattagatgatacagaacgtgaattattaacgagcgatattgtcattactaatggacaaactccaattgcattagctggtgttatgggtggcgatttttcagaagttaaagaacaaacatcaaatatagtgattgaaggtgctatttttgatccagtttcaattcgtcatacatcaagacgtttaaatttacgcagtgaatcatctagtcgttttgaaaaaggaatagctactgaatttgtagatgaagcagtcgaccgtgcatgttatttattacaaacttatgcaaacggaaaagtgctaaaagatagagtgtcttcaggagaacttggtgcatttattacaccaatcgacatcactgctgataaaattaatcgcactattggatttgatttgtcacaaaatgatattgttactatttttaatcaactagggtttgatacagaaataaatgatgatgttattacagtgctagtaccatcacgtcgtaaagatattacaattaaagaagatttaattgaagaagttgcacgtatatatggatacgacgatattccatcaacgttacctgtcttcgataaagttactagtggtcagctaactgatcgccaatataaaactagaatggttaaagaagtgttagaaggtgctggattagatcaagctattacgtattcgttagtttctaaagaggatgctactgcattttcgatgcaacagcgtcaaacaattgatttattgatgccaatgagtgaagcgcatgcgtcattacgtcaaagtttattaccacatttaatcgaagcagcatcatataatgtggcacgcaaaaataaagatgtaaaattatttgaaatcggcaatgtcttctttgctaatggagaaggtgaactaccagatcaagttgaatatttaagtggtattttaactggagattatgtagtcaatcaatggcaaggtaagaaagaaacggttgatttctatttagcaaaaggtgtcgtggatcgagtatctgaaaagttaaaccttgaatttagttatcgtcgtgctgatattgatggattacatccaggtcgtactgctgaaatcttattagagaataaagttgttggttttattggtgaattacatccaacattagcagctgataatgatttaaaacgtacgtatgtttttgagttgaattttgatgcattaatggctgtgtcggtaggttacattaattaccagccaattccgagattcccaggcatgtctcgtgacattgcattagaagtagatcaaaatattccagcagctgatttattatcaacgattcatgcacacggtggcaatatattaaaagatacacttgtctttgatgtatatcagggcgaacatttagaaaaaggtaaaaaatcaattgcaatacgtttaaattatttagacacagaagaaacattgacagatgagcgcgtttcaaaagtgcaagcggaaattgaagcagcattaattgaacaaggtgctgttattagataatgatttaaaccccatgtataaggatatctgaagtagattgatatccttaacatggggttttatttttggattcaccaattaggtttcgattcatttaaaaatcaaagaggcacagcggaatacagatgatgcttctcacaactgcatataaagtcatacttatgagcaaagcaaattagtatgacttacctaataggatttcctattaggatccaattcattttataaatcaaagaggaacagcggaatacagatgatgcttcgcacaactgcataaaagcctctaatgattaaaaatcaaagaggctttaaaattttttgggctttttcacgatttttaaaatgcttttttgaaatggtatctaaacgtgaaagaccgtatttttttataatttttgcggcaattacatcgactttagcaccggcacctttaggaatcgtcatattaatatattttgatatttgatccatatatgtaataaatgcgtatctagaaattatgcttgccactgcaatggctaatgacttcgattctccttttgtttcaaattttgttttctttggaagtggtatatcggataatgcgtaatggctatacacttcgcgttttgcgaactgatcaatgacgatatagtctaattgagacgaatcaattttttcaagtacatttttgatggcttcattatgaagaacagctttcatttttacttgagtccagccttttgcttgctgaatattatatttatcattgtgtagtgttaatagtgaatgtgggatgaaagcaaccaattgctcagcaagttctacaattttggtatcggttaatttttttgaatcatctacacccaaagtttttaaaataggaacatgctctttggtaacaaaagcagcacacacagtcaaaggaccaaagtaatcgccacttccagcctcatcactaccaatacagttaaattgatcatacattaaagtttgttcaagagaagaattagccatatttttctttttagttttattagtattcaattgagaatgctgcggtagaagttctttagacacagcttctgcatgattaccttgaaacatgactttacctgattggtaaatatttacagttgtattttgatactttgcacgtgctttcataccttgaggtaaattctcagtatcaaaagtaatgcgtgacattaatgtcgttatgtctttatccgacaatttaaaaacgatattcgccatttgtgtaaatcctttcatataatttcattatcattagcaaaaataatcatatcataaatgataataacgtcagaaacatttatgtatgttgtaaagaattaattgcggatacttacaaaatacatagtggtcatgtataatgtttatgaaaatgttatagtgacacaatttaaacatgataaagtattgaatagaaaattctttacattatttcattataaaaagaacattaagtcatctatagagattgtgttgttgttttatcataattgcaatataacaatattagtatcaaattcagacaaactatccagtcatattttataacgtgaatttagattttaaaaaaaggatcaggagaaattataaatggcacagtttaaaaacaaggtaaatgtatcaattaatgatcagctttttacaattgttggggaagataacccagagcacatacgatatgtagcacatttagttgatgataaaataaaagaattagggtataaagcagcaggtttagatacttcaagaaaagcaatactaactgctgtgaatattatgcatgaaaaagtactactagaagaagaaaatcgacgtttgaaacaacaaattcacaaattgcagcagcgtgagcaataaatggtcattgattttatcataatcattttctttgtgtattttgtcatcgttggattcagacgaggtttttggttatctatgatacatttgagtgcaacgattgtatcattgtggattgccagtcaattttacaaatctattgtagaaagattaattgtatttattccatatcctaaaacaacagcatttaatacaacttttgcgtttcattttaatcatctacaaaatcgatttgaagcgattgtagcttttttaatgattacattgttttgtaagttcattttatatctaattatcgtaacttttgataaaataatagcgtatcaaaacattcatattttcagtcgtgcaatgggaatgatagttggtgtgtttatgacgataattgtcttacactttacgttatatctattggcattatatcctaacgaagcattacaacatcagcttaaaatatctattgtgagtcattcattgatttttcacatcccatatttatcggctttcaccattaatttataaattatcataagaggtcaggacaaaggtatatattaatgatacgtcctggtcttctttttatggagtgttattatgacaaaaaaagatgttatcaaactattagaacaaattgctacttatatggaattaaaaggggaaaatacttttaaaatatcagcgtatcgaaaagcagctcaaagtcttgaattagatgaacgaccattagatgaaatatctgatgtaacggagttaaaaggcattggtaaaggtgttgcagaagtaatcaatgattaccgtgagaccggtgaatctcagtatttacagcaattacaggaagaagttccggaaggtcttattccacttttgaaaattcaaggacttggaagcaagaaaattgctaagctatataaagagttgaatattgttgataaagcgtcacttcaagttgcttgtgaaaatggaaaagttagtgaattaagcggatttgctaagaaaacggaacaaaacatattagaagctgtgaaacaacttggtgctaagaaagatagatatccaattgatcaaatgagaagacttaatcaagaaatcattgattatatagatacattaaattatatcgatcaatattcatctgcaggaagcttccgtcgttttaaagaaatgagcaaagatttagatttcataataagtaccgataacccaaaagcagtgcagcagcaattattaaatattcccaataaagtaaaagaagttgcagtggggaacacaaaagtttcattagaattagcgtatgatgatgaaacgattggtgtcgattttcgattaattgaaccaagggctttttatcatacattgcaacattttactgggtcaaaagaacataatataagaattcgacaacttgctaaagctcgtgatgaaaaagtaagtgaatatggaattgaacaagctgatggtacattaattcaatatgatagtgaagccaagatatatgaacattttaatgtgaattttataccacctgctatgcgagaagatggtagcgaatttgataaagatctaagtaatatcattacattagatgatattaatggtgatattcatatgcatacaacgtatagtgatggtgcgttttctattcgagacatggtagaagcaaatatcgcaaaaggttataaattcatggtaattactgatcattcacaaagtttacgtgttgctaatggcttacaagtggaaagacttttaagacaaaacgaagaaattaaggctttagataaagaatatagtgaaattgatatttattcaggtacagaaatggatatattacctgatggctcgctggattatgatgatgaaattttagcacaacttgattatgtaattggagctattcatcaaagctttaaccaatcagaagaacaaattatggaacgattagctaatgcatgtcgcaatccatacgtgcgacatatagcgcatccaacagggcgtattataggtagaagagatggttataaaccgaatattgaacaattaatggcattagctgaagaaacgaatacagtattagaaattaatgccaatccacatcgactggatctgaacgctgaaatcgttcgtaaatatccaaatgtgaaattaactattaacactgatgcgcatcatacaaatcatttagattttatgaattatggcgtagcaactgcgcaaaaaggatttgtaacaaaagatagagtgattaacgcattatcgcgtgaagcttttaaagactttattgaaaataatataaaacttaagaaatagagggattttatgagacaaaaaacattagacgtcttagaatttgaaaaaataaaatcactcgttgccaatgaaactattagtgacttaggcttggaaaaggtcaatcaaatgatgccagctactaattttgaaacggttgtttttcaaatggaagaaacggatgagattgctcaaatctataataagcatcgtttaccaagcttgagtggcttatctaaagtatcagcattcattcatcgcgctgatattggcggcgttttaaatgtatcagagcttaacttgataaaaagattaattcaagtacaaaatcaatttaagacattttataatcaattggttgaagaagatgaaggtgttaaatacccaatattagatgacaagatgaatcaattacctgtgttaactgatctttttcatcaaataaatgaaacatgcgatacgtatgatttatatgataatgcgagttatgaattgcaagggattagaagtaaaatttctagcacgaatcaacgtattagacaaaatttggaccgtattgttaaaagccaagcaaatcagaaaaaattatcagatgctattgtaacagttaggaatgaaagaaacgttatacctgtcaaagctgaatatcgacaagattttaatgggattgtacatgatcaatctgcttcaggacaaacattgtatattgagccatcatcagttgttgaaatgaataatcaaattagtcgattacgtcatgacgaagcaattgaaaaagaacgcattttaacgcaactaactggttatgtggctgcggacaaagatgcactacttgtggcagaacaagtcatggggcagttagattttttaatcgcaaaagcgagatatagtagaagtattaaaggaacaaagccgatatttaaagaggaacgtactgtatatttacctaaagcataccatccattattaaatcgtgagactgttgtagctaataccatcgaatttatggaagatattgaaacggtaattattacaggaccgaatacaggtggtaaaactgtaacattaaaaacattaggtttaattattgttatggctcaatcaggattgttgattcccacacttgatggtagtcagttaagtgtatttaaaaatgtatattgcgatatcggagatgaacaatcaatagaacaatcattatcaactttttcatctcatatgacgaatatagttgaaattttaaagcatgcagacaaacatagtttagttttatttgatgaattaggtgcaggtacagatccaagtgaaggtgctgcattagcaatgagcattttagatcatgttagaaaaattggttctctagtaatggcaacgacgcactatcctgaacttaaagcatatagttataatcgagaaggcgttatgaatgcgagtgtagaatttgatgtagatactttgagtccaacgtataagttattaatgggtgtgccgggtcgttcaaatgcttttgacatttctaaaaagttaggtcttagtttgaatattattaataaggctaagacgatgattggtactgatgaaaaagaaataaatgaaatgattgaatcattagagcgtaattataaacgtgtagagacacagaggttagaactggaccgtcttgtaaaagaagcggagcaagtgcatgatgatttatctaagcagtatcaacaattccaaaattatgaaaagtctctaatagaggaagcgaaagaaaaagcaaatcagaagattaaagctgcaacaaaagaagctgacgatattattaaagacttaagacaattgcgtgaacaaaaaggtgcagatgttaaagaacatgaattgattgataagaagaaacgattagatgatcattatgaagcgaaatctataaagcaaaatgtacaaaagcaaaaatacgataaaattgttgctggtgatgaagtaaaagtattatcttacggtcaaaagggtgaagttttagaaattgtcaatgatgaagaagcaattgttcaaatgggaattattaaaatgaagttacctattgaagatttagagaaaaaacaaaaagaaaaagttaagccaacgaaaatggttacacgtcaaaatcgtcaaacaattaaaactgaacttgacttacgaggctatcgttatgaggatgctttaattgaactagatcaatatttagatcaagccgttttaagtaattacgaacaagtttatatcattcatggtaaaggtacaggtgcacttcaaaaaggtgtacaacaacatttgaagaagcataaaagtgttagtgactttagaggtggtatgccaagcgaaggtggatttggcgttaccgttgcaacactaaaataaattataatttgataaattaaatagctgcagttaaaataatgtaaagcaacaagaatacatttcaaacatgttatttgaaataagcataaaaattgagcaaatagaaatacatgaagcatgttatctgatataatttgaacatcataataataattaaggaggattggcatttatggcaatcgtaaaagtaacagatgcagattttgattcaaaagtagaatctggtgtacaactagtagatttttgggcaacatggtgtggtccatgtaaaatgatcgctccggtattagaagaattagcagctgactatgaaggtaaagctgacattttaaaattagatgttgatgaaaatccatcaactgcagctaaatatgaagtgatgagtattccaacattaatcgtctttaaagacggtcaaccagttgataaagttgttggtttccaaccaaaagaaaacttagctgaagttttagataaacatttataagttataaccaatgacgactggggcatttctttaatgaattgctccagtttttgtttgtgtttttaatataaaaagttgaatgataagtcatcatattgtttacgacttgagaatggtgggattaataaatctatgaacgttaaatgataatctagcatgctgatagatttgtagcagttggtttgataaaaccatgttcaatattacatgatgtgcatgaaaagtcatactcgaagatgttgattatgagctagaattagtggtgataaatttgaagcacttttgtagcatcattcattttaaaattagaaggggggatatttttggaagactataagcaacgaattaaaaataaattaaatgtcgtacctatggaaccaggctgctatttaatgaaagatcgtaatgatcaagtgatatatgttggcaaagctaaaaagctaagaaatcgattgagatcatattttacgggtgctcatgatgctaaaacaacgagactggttggtgaaatacgtcgttttgagtttattgtcacgtcaagtgaaacagagtcacttttactggaattgaatctgataaaacaatatcaaccaagatataatatattattaaaggatgataaaagttatccatttattaaaattacgaaggagaaatatcctagactactagtgacgagaactgtaaaacaaggtactggcaaatatttcggaccgtatccgaatgcatattctgctcaagaaactaaaaagttattagacagaatatatccatatcgcaaatgtgataagatgccagataaattatgtctttattaccatattggacaatgtttaggaccatgtgtatatgacgttgatttgagtaaatacgcacaaatgacgaaggaaattactgattttctgaatggggaagacaaaacaattttaaaaagtttagaagagcgaatgttaactgcaagtgaatcacttgattttgaacgggctaaagaatatagagatttaattcaacatattcaaaatctgacaaacaaacaaaaaattatgtcatcagataaaacgattcgtgatgtctttggttattgtgttgataaaggatggatgtgtatccaagttttctttatacgacaaggtaatatgataaagcgagatacaacgatgattccattacagcaaacagaagaagaagaattttatacatttattggacaattttatagcttaaaccaacatattttacctaaggaagttcatgtaccacgtaatttggataaagaaatgattcaatctgttgtggacactaaaatcgttcaacccgcgcgaggtcccaaaaaagatatggttgacctagctgcacataacgctaaagtatccttaaataataaatttgaattaatatcacgtgatgagtcaagaacgattaaagctattgaagaacttggaacacaaatgggaattcaaacaccaattagaattgaagcattcgataattctaatattcaaggtgtggatccagtgtcagcaatggttacatttgtcgacggtaaaccagataagaaaaattatagaaagtataaaatcaaaacggttaaaggtccagatgattacaaatcaatgagagaagtagtaagacgacgatattctcgcgttttaaacgaaggattaccattacctgatttaataatagtcgatggtggtaaaggacatatgaacggggttattgatgtgctacaaaacgaattaggtcttgatatccctgttgcaggtttgcagaaaaatgataaacaccaaacatctgaattattatatggcgctagtgcagaaattgtaccactgaagaaaaatagccaggcattttatttgttgcatcgtatccaagatgaggttcacagattcgcaatcacatttcatagacaaacacgtcaaaagacaggcttgaaatcaatacttgatgatatagatggtatcggtaacaaacgtaaaacattattattgcgttcattcggttcaatcaagaaaatgaaggaagctacacttgaagattttaaaaatataggtattcctgaaaacgtcgcaaagaacctacatgaacaattgcataaataaattactgggcgtgagaatcattctcatgccccaaaatatatgaaataatgttacaatatggttaacaaagttatttttttgaatgtacgtggaagcgttttctaaatgagaaagtttatcatcacaagcaattttaaatatcgaatccaaatgttacattgttcgacatgcagtttggtgatcgtacagtgtgtatttgtctttaaaatgtttcgcttaatgataatgacaacgctagaaacgatatcactttagggggttaagcgtacgtttaatataaatagctcaataaattaaatattcgttcacaggggggactccttttggctcaatcaaaaaatgaattttatctaagacgtattcactcgttattaggtattatcccaataggtgcatttttggtcgttcatttattagtgaatcaccaagcaacacaaggtgctgaagcgtttaataaggcatctaactttatggaatcattaccatttctaattattgtagaatttttatttatatacattccgttgttatatcacggtttgtttggtatacacattgcatttacagcaaaagaaaatgttggacattactcgatttttagaaactggatgttcttcttccaaagagtgagtggtatcttaacatttatctttattggtatccatttatggcaaacacgtttacaaaaagcattttacggcaaagaagtgaattacgatttaatgcacgaaacattgcaacatcctggatgggcaatattttatattatttgtattattgctgttgtgttccactttgcaaatggcttatggtcattcttagttacttggggtggacttcaatctccaaaatcacaacgagtatttacatgggtttcattaatcgtatttttagttatttcgtatattggtgttactgcaattattgcctttatgtaatacatcgcatttaacaaatatagattgaaaatttaggggagtgaaatttttatggcagagaaacatcttattgttgtcggaggtggcctagcgggcttaatgtcaacaattaaagcggcagaaaaaggtgcacatgtagatttgttctcagttgtaccagtaaagcgttcgcactctgtttgtgcccaaggtggcattaatggtgcggtcaatactaaaggggaaggcgattctccttggattcactttgatgatacagtgtatggtggcgacttccttgcaaaccaaccacctgttaaagcgatgacagaggcagcacctaaaattattcatttattagaccgtatgggtgtaatgttcaatagaacaaatgaaggtctattagattttagacgtttcggtggtacattacaccacagaacagcatatgcaggggcaacaactggacaacaattattatatgcattggatgaacaagttcgtgcatatgaagtagatggattagttacgaagtatgaaggatgggaatttcttggcatagttaaaggtgacgatgatagtgcaagaggtatcgttgcacaaaatatgacaactgctgagattgaaacatttggttcagatgcagttattatggcaacgggtggccctggtattattttcggtaaaacaacaaactcaatgattaatacaggatcagcggcttccattgtttaccaacaaggcgctatttatgctaatggtgagttcattcaaattcatcctactgcaatccctggtgatgataaactgcgactaatgagtgaatcagcacgtggtgaaggtggacgaatttggacatataaagatggtaagccttggtacttcttagaagagaaatatcctgattatggtaacttagtacctcgtgatatcgcaacgcgtgaaattttcgatgtatgtattaaccaaaaattaggtataaatggcgaaaacatggtatatcttgatttgtcacataaagatccacatgagttagatgtaaaactaggtggtatcattgaaatttatgaaaaattcactggtgatgacccacgcaaagtaccaatgaagattttcccagctgttcactattcaatgggtggtctatatgtagattatgatcaaatgacaaatattaaagggttatttgcagctggagaatgtgacttctctcaacatggtggtaaccgcttaggtgccaattcattgttatcagcgatttatggtggtacagtagcaggtccaaacgcgattgattatatttcaaatattgatcgatcatatactgatatggacgaaagtatttttgaaaaacgtaaagctgaagagcaagaacgttttgataaattattagctatgcgcggtacagaaaatgcctataaattacaccgtgaacttggtgaaattatgacagcaaatgtaactgttgttcgtgaaaatgaaaaactgttagaaacagataaaaagattgttgaattgatgaaacgttatgaagatattgatatggaagatactcaaacttggagtaaccaagcggtattctttacccgtcaactatggaacatgttagtacttgcacgtgttattacgattggtgcatataaccgtaacgaatcacgcggtgcccattataaaccagaattcccagagcgtaatgatgaagagtggttaaaaacgacaatggcctcattccaaggcgcatttgaaaaaccacagtttacttatgatgacgtcgatgtgagtttaataccacctcgtaaacgtgattacacaagtaagtctaaagggggtaaaaaataatgactgaacaatcagtgaaaaacactccacaacatgaaacacaatctaaaccgaaacaaaaaacagtaaaattaattattaaacgacaagatacaagtgattctaagccttatgaagaaacatttgaaattccatatcgtgaaaatttaaacgtcattgcttgtttaatggaaattagacgtaacccagttaatattaaaggtgaaaaaacaacacctgttgtctgggatatgaactgcttagaagaagtatgtggagcatgttctatggttatcaatggtcgtgcaagacaatcttgttctgcgattgttgatcaattagaacaacctattcgtttagagccaatgaatactttcccagttatccgtgacttacaagttgatcgttctagaatgttcgataacttaaaacgtatgaaagcatggatcccaattgatggaacgtatgatttaggtccgggaccacgtatgccagagaaaaaacgtcaaacagcttatgaattatctaaatgtatgacatgtggtgtatgtttagaggtttgtcctaatgttactgaaaataataaattcgttggtgcacaagcaatctcgcaagttcgtttgtttaatttgcacccaacaggatctatgactaaagatgaacgtttaaatgcattaatgggtactggtggcttacagcagtgtggtaattcacaaaactgtgttaatgcttgccctaaaggtattccattaacaacatccattgcagcaatgaacagagaaacaacattccacatgtttaaatcattctttggttcagaccatgaagtagaataaaaattaatcccttttgagttaaaatgttatgttcctttcaaaattaaattgaatggagatacacaataacttggaagggatttttttaataagcagattacatgacaatatgatagtgggctgatttaaaataaatattataatgacaaaaatggtaaacacagtgcataatactaaaatccaatgcttagttatgataaactaaaaattaaattaaaagtaaggatgaccgaatatgaataaaccaataggtgtaatagactctggtgtcggaggtttgacagtagctaaagaaattatgcgtcagttgccaaatgagacgatttattacttaggtgatattggacgatgtccatatgggccaagaccaggagaacaagtaaaacaatatacagttgaaatcgctcgtaaattaatggaatttgatataaaaatgctcgtgattgcttgtaatacagcaactgctgtagctttagaatatttacaaaagaccttatcaatcccagtgattggtgtaattgaaccaggtgctagaacagcaataatgactactagaaatcaaaatgtattagtactaggaactgaaggcacaattaaatctgaagcatatcgtacgcatattaaacgtatcaatccacatgtagaggtacatggcgttgcctgtccaggttttgtgccacttgtagaacaaatgagatatagtgatccaacaattacaagcattgtcattcatcaaacactgaaacgttggcgtaatagtgagtctgatactgtcattttaggatgtacccactatccattgctctataaacctatctatgattattttggtggtaaaaagacagtgatttcgtctggattagaaacggctcgtgaagttagtgcattgctaacatttagtaatgaacatgcaagttatactgaacatccagatcatcgattttttgcaacaggtgatcctactcacattactaacattatcaaagagtggttaaatttatctgtcaatgtggaacgtatatcagtgaatgactaggaggatttttaatgaaagagattgttattgcatcgaataatcaagggaaaataaatgactttaaagtaatatttccagattaccacgtaataggtatttcagaactaataccagattttgatgtggaagaaacaggatcaacatttgaagaaaatgctatattaaaatcagaagctgctgcaaaagcattgaataaaactgtcatagctgatgacagtggactagaagtttttgcattaaatggtgagccaggtatatactctgcacgttatgctggtgaaaataaaagcgatgaagcaaatattgaaaaattattaaataagcttggtaatacaactgatcgtcgtgcgcaatttgtttgtgtcataagtatgagtggccctgatatggaaacaaaagtatttaaaggtactgtttcaggtgaaattgcagatggaaaatatggcgaaaatggtttcggatatgatccgatattttatgtaccgaaattagataaaaccatggctcaactttcaaaagaacaaaaagggcaaattagtcatagacgaaatgcgattaatttacttcaagcttttcttgaaggtgaaaaaaatgtctaaatggattattgtgagtgataaccatactgaatcaggcgttttatatcaaatttatgaaatgcacccagatgcagatgtatatttacatttaggagattcagaattcgcgtatgatgatacggaacttagcttatttaatagagtaaaaggcaattgtgatttttacccagaatttgaaaatgaagcggtcgcaaaatataatgacgtgaaagcattttatactcatggacatttatatcaagtcaatcgaacaagagatttattagctgaaaaaggacttgaattaggttgtttgtttgcattttatggacatacacatgtggcaaaatatgagtatattaatggtgttcatgttattaatcctggaagtatatctcaatctagaagttcaatggaagaaacatatgctgaagttattattgatgatcaaactttacatggcaccatcaatttcaaaaatcgacatcacgaaacaatcagtcatactactttttaaatagaagtagctatggctttttttagtttatagactgatttaactaggaggtcgtgtcatgaatgtttgtttaaaagtatttctgacaattttataagataattggaatgaataacacatttatgttatgaaaagaattgtaattttggagaatgtgattgttgataaccctatatggttgaatcatgttgattatttggttaaaagtgtattattaaaaagtataaaattaagattccaagaagtcaggaaatttgaaattttagttaaaatcatgaatcgtatacatatttaaaaggatttctaaagtcataaattatatcaataatttgatggttaaaatatggagtagcaaaattcttgaaattcagaaatgtagtgacacaaatattaatgtttagttaataaatagttaatgtagttttttgtatctgtctattattataaatatatacaaaataaatatttgaggataggtgttattaattatgaaaaagaattttattgggaaatcaattttaagcatagctgctattagtttaacggtatcaacgtttgccggtgaatctcatgcacaaactaaaaacgttgaagctgctaaaaaatatgatcagtatcaaacaaactttaaaaaacaagtaaataaaaaagttgtggatgcacaaaaagctgtaaacttgttcaaacgtacaagaactgttgcaacacaccgtaaagcacaaagagctgttaatttaattcatttccaacacagctatgaaaagaaaaaattacaaagacaaatcgatctagttttaaaatataatactttaaaataattgatagaagccatgctatagagtgtggctttttgctatatccaaaggtataattattttataatattgtgtttatttgaatggtgagcttattgggataaatcatataaataattacttaaaagtgaatgcaatagttgtttatgttttgaacaagcgaggtggctattgtgaaaaggaaatcgaatgtattaacaatcataaaaattgtaacggatatagtggcaaccgtgttaatcatacgtgctttattaaacagtcgtaaagatgctaaataaattggaagttacttaaaataaaaaagcacgccaatacgttagcattgttttctaacgtttggcgtacaactatttaattcagtatgttaattaatcccaataaatcgagtcgatttcaccgtttttaacaactttaatattttttctgttctcttctaaaggacgagttaagtcaaaagtatagtaatctctaggaccaccatctttaattctgacaactgctttcttcacatcaccttggcttaattttttaacaataaggtacagatcattaacagtttcagctttgtaaggagttagatttttatcagactctttcattaacttatcaatacgttcatcgtcctttttagcttgatctgctaaattttttgcgatttctaaacctttccattcataactaaagaaagctttagcatcattagtttgagttaaaagacctgcagcgattactgtagatgcgataatagtttttgtgatattttttttcataataagttctccctgtaaaataaatttgtacttactaatgcgagtacactgctattttacaaacggtttcatgcatttaccagttaacacttcattaattataattaagtgcaaattaataaggtttaatgcaatcgaaaaagaataatgatgaatttgatggtattatttttatttgaggtattattgaatttgttgatagtataataatagtagtaaacgtcactcaactatgattggataatttttattgttaaaacgatatatatttctttgcattttgtttgcaatgttgggtagacaaacactccaaattgttatacatatagcttttttgatatatattttttataaaacaaagaaatgattcatagtagagaagtaattaatatgtataattttacttataaagaaataagagatatattctaattatggttgatatgttatgattaatatataagttaaaaattatactatttaattgaattatgcattttcgaagtaaacataattcaacacttacatttttaattagataaaatagtgtaaaatcacgtgccaagattactatagagtaggcattgagtattattggcaatcacttaagtgattgttatttttcgtggtcaataataaagatataaataaatatattgaggtcaaacgatgataattaaaattttaacaattctattactactttgtatattgagctatttggttacaaatagaaagaagccttttctgttcttaaagacactctttatgggtgtggtatttatctttataggatatatttcactggcaatatctgccgtaattatttatggtattattcaatttatcacaattgattttggtagttttttcttaatgggtattatattgatcttgatttcaagtatattccaattatttatagttagattactttttagaaaaaagaatgtcgatttgacagaggttgtcgttttagagcatttaattcaatggttcttagtttactttgcgatctatcaagcagtaaatgaaaaaatggacattaatgatattaatatcgacaatttccaatctgtcttttttgacgtgtctaatttgaatttagtaattctaccaacgttaatcattagctgggtcacaatatttaactatagaatgagaagttacaaataaaatctatgaaattataccatcagacaccaacattcaaatggtgtctttttttgttgtgtggttttatttttgaaattcgaaaaagtagaggcgtgaattttttgactagtgtataagtgctgatgagtcacaagatagataactatattttgtctatattataaagtgtttatagttaattaataattagttaatttcaaaagttgtataaataggataacttaataaatgtaagataataatttggaggataattaacatgaaaaataaattgatagcaaaatctttattaacaatagcggcaattggtattactacaactacaattgcgtcaacagcagatgcgagcgaaggatacggtccaagagaaaagaaaccagtgagtattaatcacaatatcgtagagtacaatgatggtacttttaaatatcaatctagaccaaaatttaactcaacacctaaatatattaaattcaaacatgactataatattttagaatttaacgatggtacattcgaatatggtgcacgtccacaatttaataaaccagcagcgaaaactgatgcaactattaaaaaagaacaaaaattgattcaagctcaaaatcttgtgagagaatttgaaaaaacacatactgtcagtgcacacagaaaagcacaaaaggcagtcaacttagtttcgtttgaatacaaagtgaagaaaatggtcttacaagagcgaattgataatgtattaaaacaaggattagtgagataatacttctgtcattattttaagttcaaaataatttaatattatattattttttattaataaaacgactatgctatttaatgccaggttaatgtaactttcctaaaattgactatataatcgttaagtatcaattttaaggagagtttacaatgaaatttaaaaaatatatattaacaggaacattagcattacttttatcatcaactgggatagcaactatagaagggaataaagcagatgcaagtagtctggacaaatatttaactgaaagtcagtttcatgataaacgcatagcagaagaattaagaactttacttaacaaatcgaatgtatatgcattagctgcaggaagcttaaatccatattataaacgtacgattatgatgaatgaatatagagctaaagcggcacttaagaaaaatgatttcgtatcaatggctgatgctaaagttgcattagaaaaaatatacaaagaaattgatgaaattataaatagataataaataaaacaggttgagacaaaaaatggtcttaacctgttttcaatttgcatatgtgataaattctatatcaaaatgcttatgtataatgaatgacatttaaaagtaggggagacaaatataaatacaatagttcctaggattactctcaaaataactatatcaattatttactttgctcttctattttttaaaatatgtacatgtttaaataatcaaaagtgtacattattaaattatcatttccagttctagtgctatattggtagtagttgactaaatgaaaataagcttataacaagttttttcaatactcgtggggccccaacacagagaatttcgaaaagaaattctacaaacaatgcaagttggggtggggccacaacagagagaaataggatcaccaattccaacagacaatgcaagttggcggggccccaacatagagaaattggatcaccaatttcaacagacaatgcaagttggggtggggcccaacacagaagctggcgaaaagtcagcatacaaaaatgtgcaagttggcggggccccaacatagaagctggcgaaaagtcagcatacaaaaatgtgcaagttggggtaggacatcgataaaaaaatactttttctttagaaattagtatttcttatgcatgagttttactcatgtattcattttttaagtagacattagctacagctaatgataaagaaccactacataataaatcattagtggttctttatcatttctatctcactcttttactggaagaaaaagtttacgtttgtagaacatgccacaataccaaaaataattaagaaaaataagacgataagcatgatgacacttttcaaacaacctctatcagtttcttccgattttctttgttgaacctttttataatcttcaagtagttttgtcgcttttttatttatatgtttattcatgatgttgactccttataatatatgtttaattcattaaaatagttgaaaacatgacttgaaataaagatataaagctaaagtaaggatgttcaattgtttcaaattttatgaaagtataacgttaaatatgttaatttgatgatgatatttgctttttattttccaaatggaatttacttaaactgatgcattaaaatattaatgaagcactagaatacataaatgaatagtaatggtgcacagtatagaataattaaggctatattaagtataaatatcgttaactgtaagctatctttagttttaatataaactattaggataatcgacgtaagaagaatcatatatattaatgatgaagaagtccatacaaaatccgcatcatttgttgttaataatgggactataattaatccgaaattaatcatgcatgctatatatactataatgttatacacaatgttaatttttgttcaccaccttatacttctattttaaaaacttctttataatgatatattgtttaatgttgaaataattagattatctaattttcatttgctttacatgtaaaaggctatatatagtatgctctttatgattctaaatgctttttaatatttaatgctcatcaacatttggattttgaatattcaattcaaaaactttattagctacgtcaattgtaaaatcagaaccatagttgacatgagctacttttaattttccatctaaataatagattgcgattgcaacatcgtaaaattcgtcaatgacaaataaactcttttcgtttgttacaacctcatgctctcctgagtatacaacgttaatttcccaatcattaaaaaccatttgttaacctccttgatcatttaaattgattcaacttaagtttaacttattcatacaacttcgtacaatatctagatgaacattaattgtatttctagaaatctttttcaattatatgtactaattatacttttaaatttcttatttcagtatagttttaaaacgattttaaaataattctgcaaatatattaacacataatgtgttcaaaaagttttgaacaatttcaaaacttttatataaagggtttgacaacatggaattcaaatttcttattttaaaaatcacctcatatagtgtcatgtttagtctaatttttaagtcaggaaagcaaatcaagtacatagtttaaattaaaaatatcataagttaattaaactaaattaagtataaaaattaggttcttcatcttttatggtgggaaggtaaaacttcctgctttttttaatacacaaaaagcgcaattgcctctataatttaaagtgaccaaacccaaactaaaggagacaagtgcgcctatgtgtaatgataccttagaattactaagaataaaagatgaaaatataaaatatataaaccaagaaattgacgtcattatcaaaggaaaaaaagcaacagtggttaatgctgtactaacgtataagccttcggcctgttattgttgtggagttaaaaatgaaggacaaattcataaacatggtaagcgtgtttctcgtattactttacttaaaactcaagggtataacacatacctcaacttagctaaacaacgttttaaatgcttagaatgcaatggcacttttactgctaaaacgtcaattgttgatgagtcgtgttttatctcaagatgtgttactcaaaaagttatagaagaagctactaaagttaaaacagagattgatactgcagaagataactgtatctctccatctactgtaagtcgtattagaactaaagcggctaattcattacgaattaaaccgtttaattgtttgccagaacacatcgctatggatgaatttaaaagcgttaaaaatgtaactggatcaatgagtttcatttttatagataatgatactcatgatgttatagatattttagaaaatagaactacaagattcttgcgtgcctatttcgagcgattcgatttaaaaaatcgacaacaagttaagacggttactattgacatgtatgaaccctatgtccgattatttcgcgacctatttcctaatgcagctattatttttgacagattccatatcgttcaacatttaaatagggaacttaataagtatcgtgtacaagttatgaatgaataccgtaataaaaaaggacctaattatacaatttttaagaataactggaaagttctattgatggatactagtaaaaccatatttagtaaatacagatggaataaatcttttaaggcttataaacgctcatctgacattgtagaattcatgctttcaaaagacgatatactacgacgctcctacgaacttgtccaaggattaagaaaagatctaaggttatgtaattggcctaaatttattaatcgtttaaattcagttagtaaaaagtctgtgagtaaaggtgtatggaaagtggttaaatattatagaaaacatcaaaggatgttaagaaatacaatttattacccagcatttaataatggtgctatagaaggaattaataataagataaaattaatcaagcgaatttcttttggttacagaaatttcaacaactttaaagcacgtataatgatgattttcagcttatacaaaggagaaaaaaagaagacaaccaagcccaataatggactggccgcctaataataaaaactctaaaagttgtaatttaaaatagttctttaaattatatacccaccacatttggtggagaaccaaaaattagccgaaaaacatcatttctgaagttatcggctaaagttataaattatatttatttgtacatgaacaaataatttacattaatttgtcatttcttctttttcccaatcgattttatatctttctgaagaacgatctgtccatttatctttagtattggtacctttccaatttgttgaagtccaatgcaattggtagtcatcacgaactcgttcgtatattacatctatatttgtttgttgtttggatgcttttctatccatagtaataactgtagcgaagtctggtgaaaaccctgaagataatagagaacttgctttgttaggatcaaggaagttctctgctgctttcatagaaccatttctagttttcatgaaaagttgattgccatataccgggttccaagaatctctatcatatggtccccaattttgattcaccatattgttaaatatcactttccagcctacttttttatcagttgggctctctaaaattgttttgaaatcaggttgaacatatttcagtgtatgaccaatcgaaacatttgcaccaataaggccgccaatttttcctgtatcatcaccagtaacattaccgttgaatccataagttaaagtactcatatactcttttgtatcaatcgaatttcttggatagtaatcagatatttgagctacttcattatcaggtagttgcaactgtaccttaaaggctgaaggccaggctaaaccacttttgttagcaccttcttcgctataaactctatattgaccagcaatggtacctttcgttctaataactagcagttttttattgtgatttttatcatcgataaaactataaaatacttttttgtgcatgccattttctttatcataagtgactaaatcacctgtttttactgtagtattgcttccaatatctgtagtaccggttttaatattaatatcagaatctgcggcattagcgacaggattcattaatatggaacctagcaatagtgttgttgttactgagctgactatacgtgttttcattttcatcatccttctattttttttaacgatttgaggaaacaataatcaatatgtcaatttagaatattgcagttgagacatatcaaatatttataatcgtttatattagtatatttaatgtagcaactgataaattactgagtgatgatgagtgattattttaagaatatgtttttaacttttatttaaaatttgaaaggaagcatttcaatttcgagggttagtcaaagttgaataaattctttatgaaacaaggaaaagacatagctaattttattgattaatttctttaaaactaatgatttgtttgatttaaaaatgtaatcgattacaatataaaaatacaaatatcttagaattaaatcaattaattaactattaaataaaaattaaatatatattaactactgtaaattaataaatagaaatagagaaaaagggtattaattatgtttggaatttcgtcgggaataatttttgccattacatagaaatatctaatagataatgaaaaagtatcgtatgtatttttaatatagtgtaaaatatcatatgtaaaataaaatgtagatttttagttagaggcattataagaaaattttgagtataggttagcttttaattatgaatcttattgaaatttgattaataaatatatgataggggattaaaatgaaactattttatatcgtatttcttattattatatggctgaatatatttttaggaaatgaaattatccatacactgactgttttaataacaacattgtatattgttaattcaagaaaggggattaaaaatgacagagttgaataatattataaactctcttcaatctttgtttgagtctgaatcaggctataaaatttcgaaaaattcaggagttccatatcaaacagtacaagatttaagaaatgggaaaaccaaactagaagatgctagatttagaacgattattaaactttatagttactatgtctcattaaaagaacattaatcatgggacaataaagtattgctataataattgaatcattaaatgaaggaatagagcctaagacataataaatcaatgtcttaggctctacaatattatattggtagtagttgaccgaatgaaaatgaccatgtaacaagcatttttggggccccaacacagaagctgacgaaaagtcagcttacaataatgtgcaagttggggatgggccccaacacagagaatttcaaaaagaaattctacagacaatgcaagttggcggggccccaacatagagaaattcaaaaagaaattctacagacaatgcaagttggggagtgacaacgaaataaattttataaaataccatttctgtcacattcctactcccaattccatttaaatatatagaaaatttcacctattatatacatcatacactttaaaaattatcatttaaataatctgatttggaattaaagtgcatgaagtataagtcaccttcatatactaatcaaagaggacgtcaacagttattttattaggatttttaacataaacatttgctagatctgaatgtaatcttttgcttaaatcaatagtgtagttattaccgccaccggtgatcttaagcttacctttattacgattttcggtatataatattttattttttattaacgcttctcgtgcacggaaatcgatttctttcaatgttaatactggtttattgccttggtatattttatgcgcaccaataatcgtttgtagtttatctttgtattgcacaaaaagattataagttttatcagaaggttttgcggctggtgtaacgccacctgtaaatgtctctctataagaccaccataactgatcagtatctttgtcttttagtccaaacacatctacgtaacgatcttttaactgattaatatttccccaactttcagcgccccataaagatatatgtgctgaccatgaatatctcttaagttcaacataaatgtttccattatcatattgatatagccatttatttgaaaatgaaaaatgaggctgtgtgtaatatttaattaattcattgatgttagtttcatcttgaccaatgctataagctttagcttcagagtaaaaactaaatactggtttttgattttgaggtaatacagtacctaatagtaataatgttgtcgttaaaattatatttttcgtgatgttcttactcattagaacatctcctttcagaggaatcatgatacgaggaataagaaatttaaatgtgagcgaagtcaatatagtatttgcgattatttttattaactccattattattgttagtttgatttttcgaggataacttcaatttttgcattttgaggttttttaacatatctatttgcatcagttgatggcaaccttttacttaaatctattgtgtagttattgtctgtacctgttattttaatttgtcctttattataagaattattatataattttttacttttaattaatgtttgacgaatacgaaaatctaattcttttaaagttaaaacaggcttattgccttcataaactggaaatccgccagtaaacgtttctgctttatctttatatgttacattcagtttatagtgtttatcgttagatgttgctgcaggagtaacaccaccagtaaacgtttcttgagataatgcaaaagaatcaatggtttcttggtcttttatgccaaaaatatcaacgcttttatttcttaattggttgatattgccccaactttcaggtccataaacttgaatatgactataccaagaaaactgtaacaacgttgcatgaatcgtaccgttatctttttgccataacgtactgttagagaaggttaaatatttttgcgagtaatatttagttaactcattaacgttagtttcgttttgatttatataataagctttcgcttcagatgaagaattgataggtgtattaggaaattgtgtaaatgctgtacctaatagtaacaatgttgttgataaaataatttttttcgtgatgttattgttcattcgaatttctcctttgagtattgttggaatgtttaattataaaaaggggttaattagataattgaaattatccgcatttacaaaaggtaataggttagttagatttttcgagtatgacttcaatttgtgcatttttaggatttttaacataacggtttgtgtcagttaattttaactttttacttaaatcaatcgtgtaattatttccatcagcagttatcttaatttgacctttattaaattctccgttatataactttttattctttattaatgtttgacgaatacggaaatctaattcttttaaagttaatactggtttatttcctttgtaaaattcatgtccaccgatgatagtttgttgtttatcactatattttaaaaatagtctataaggtttatcagatgaagtagctgctggcgtaacaccaccagtaaatgtttcatcataagtccagtaaccttcaactgtgtcctcatctttagttccaaatatatcaacgtatttatttcttaactgattaatgtttccccaactctcggatccaaacacttgaatatgactataccaaacccacgtttgcaatgttgcatgaatgctaccattgggcttttgccatagccattttccagataatgaaaaatgcggctgagtgtaatatttgattaactcattgatattagtctcgttttcactgatattataggcttttgcttcagatgaaaaactgattggtgttttaggaagttgtgttgatgtggttcctaaaagtaacaatgctgttgataaaactaatttattcatgatgttctttttcatatgaaaatctcctttgcgtgaattacccaaagtatataagctattacaccgattcggaattaaataaaagctaaaactatgttaaataaacttaaacagttagtagtgttatttaagcaaaacttatcatttttaagttttggacagaaacagtacttaataaagtaggcgggagttatatattaaaaacgacacgttacaattattctctaatcaattgcattaaattgtttgataattgaattttctaactacttgaaaaatagttatactttaaatgtagtacttattttaattatttcctactacttaaatttaatattaataaaatgttcatttaattattgataaaatattacaaattttaatagtaggttgtgtttattttgtatgcgcttacaatttaggtgtaactaaaataaaaggagttgttattaatgaaaaatttacgaaacagaagttttttaactttattagacttttcacgacaagaggtagaattcttattaacactctccgaggatttaaaacgtgctaaatatattggcactgaaaagcctatgttaaaaaataaaaatattgcactgttatttgaaaaagattctacaagaacgcgatgtgcatttgaagttgcagcgcatgatcaaggtgcaaatgtaacttatttaggcccaactggatcacaaatgggtaaaaaagaaacaactaaagatactgcacgtgtgcttggtggaatgtatgatggcattgaataccgtggtttttcacaaagaacagtagaaactttagctgaaaattcaggcgtaccagtgtggaatggtttaactgatgaagatcatcctactcaagttcttgctgatttcttaacagcaaaagaagtcttaaaaaaagattatgcagatattaactttacatatgttggagatggtcgtaataacgttgcaaatgcattaatgcaaggtgctgccattatgggtatgaacttccatttagtttgtccaaaagaattaaatccaacagatgaattattaaatcgctgtaaaaatattgccgctgaaaatggtggcaacatattaatcacagatgatattgaccaaggtgtaaaaggttcggatgtaatttacactgatgtttgggtatcaatgggtgaacctgatgaagtatggaaagaacgacttgaattattgaaaccatatcaagtaaataaagaaatgatggataaaactggtaatccaaatgttatttttgagcattgcttaccatctttccataatgctgatacgaaaattggtcaacaaatttttgaaaaatatggtattcgagaaatggaagttacagatgaagtattcgaaagtaaagcttcagttgtattccaagaagctgagaacagaatgcatacaatcaaagcagtcatggttgctacattgggtgaattttaaatgatataaggaagtgaatatgatggcgaaaatagtagtagcattaggtggtaatgctttaggaaaatcacctcaagaacaactcgagcttgttaaaaatactgcgaaatcattagtaggattaataacaaaaggacatgagattgttattagtcatggtaatggaccacaggttggaagcattaatttgggacttaactatgctgcagaacataaccaaggtccggcatttccatttgctgaatgtggcgcaatgagtcaagcttacatcggctatcaattacaagaaagcttacaaaatgaattgcattctattggaatggataaacaagtggtaacactagtgacacaagttgaagttgatgaaaatgatccggcatttaacaatccttcaaaaccaattgggttattttacaacaaagaagaagctgaacaaattcaaaaagaaaaaggatttatatttgttgaagatgctggaagaggatatagacgcgttgttccttcaccacaacccatctctattattgaattagagagtattaaaacacttattaaaaatgatacactcgttattgctgctggtggtggaggtataccagtaattagagagcaacatgatggttttaaaggtattgatgcagttatagacaaagataaaacaagtgcgttgttgggtgctaatattcaatgcgatcaattgattattttaacagcaattgattatgtatatattaattttaacactgaaaaccaacagcctttgaaaacaacaaatgttgatgaattaaaacgatatatagacgaaaatcaatttgcaaaaggaagtatgttaccaaaaattgaagcagccatatcatttattgaaaacaatccaaaaggaagtgtgcttataacatcattaaatgaattagatgctgccttagagggtaaagtaggtactgtgattaaaaagtaattgaattgaaacgcttttcaattactatatgtcaaatgcatgatttttattatttatgtgcaccccctgaaaataatgcctctattttgatgcggggtgcactttcttaatttatatttataaaatctttaaggtagaaatgctaggttaaatgtcgaaggagatgaaaccgtggaaaatacaattaatgaaagtgaaaagaaaaaacgatttaaattaaaaatgccaggtgcatttatgattttattcattttaacggttgttgcagttatagcaacatgggttattcctgctggtgcatattctaaactttcttacgaaccttcatcccaagaactaaagatagttaaccctcataaccaagtgaaaaaggttccgggtacgcaacaggaactagacaaaatgggggttaaaattaagattgaacaatttaaatcaggtgcaattaataagccagtatcaattccgaatacttatgaaagattaaagcaacatccagctggaccagaacaaataacaagtagcatggttgaaggtacgatagaagcggtcgatatcatggtattcattcttgtactagggggacttattggcgtagttcaagccagtggttcttttgaatcgggattgttagctttaacgaagaaaacaaaagggcatgaatttatgctaattgtgtttgtatcaatactaatgattatcggcgggacgttatgtggtattgaagaagaagctgtagcattctatccgattttagtccctatatttatagcgttaggatacgattctatcgtttcagttggtgccatattccttgccagctctgtcggtagtacattttcaactattaacccgttctcggttgtaattgcctctaatgccgctggtacaacttttacggatggcttgtattggagaataggtgcttgtattgtcggtgcgatttttgttattagttatttatattggtactgtaaaaaaattaaaaacgatcctaaagcgtcatattcttatgaagacaaagatgcttttgaacagcaatggtctgtattaaaagatgacgatagtgcccattttactttgcgtaagaagataatccttacattatttgtactaccatttccaattatggtatggggagttatgacgcaaggttggtggttcccagttatggcttcagcatttttaatatttacaattataataatgtttattgctgggacaggtaaatctggattgggagaaaaaggaactgtagatgcatttgtcaatggtgcatcaagtttagtaggtgtatctttaattattggtttagctcgaggtattaatttagtgttgaatgaaggtatgatttcagatacaatcttacacttttcatcatctttagttcaacatatgagtggaccattatttatcatcgtattactatttattttcttctgtttaggttttatcgtgccatcatcttctggattagcggtattatcaatgcctatctttgcaccactagctgatacagtaggtataccaagattcgtcatcgttacgacatatcaatttggtcaatatgcgatgttattcttagcgccgactggacttgttatggccacactacaaatgttaaacatgcgatattcacattggttccgatttgtatggccggtagttgcttttgtattgattttcggtggcggagtactaattacgcaagtactaatttattcataatttgaaatgctatattataaaaatactaattgggttttatgcatctcgtaggtttgtagaaatactaaactaagcgaggtgcattattatttttgattaagaaaataatgacggtaatgataacactagtaagtaattgatacaatgctctatttaataatgatatttttaaaatttgtttttaatgtaatgttagatctatggtatattatatttatcgtggtaaatatgtatttgctgtaaacagtttttgtaacacatgacacatatggttgtgaaaatagcatatataaaggatggctataaatgacacatttgacaaaggttttagatacactaactggaatatgcgtagtattattatttagtaaatattttgtggcgtatgcaaatatggtgtttgattggaatttaagatggtatttgctagaaaacataccacatttgccaattatattatttattctgatgtttattttcggagtaccttctgaaatgataaaagataggcaaaggaaaaataacggtgtttaatttatcgatatttagaggtgataaaatttgtcaactattacaaagactaaaataaaaatctttattaattattttattggtatattagccttggcgtttgctgcttatatattatttaaataaaggttagagtgaaacgtgtttatgaactagacgttctagtatagttactacagctttagtcagaaggtatcattgataagatcatattaaatcaaagaggcattgatatacactaaaaagaggcaagattacctgcctcttttttagttattaaatatgcgtgttaattcttggtaatagtgttactgagacgcattacgaagaaatttatcttgattttccttttttaaaaagaagtgaagatatcctataaagactctaagtactattacagtggctaataacacttcgataaacaaaagacctttccaaatatctggaaacataagtacaggcaaactgttctttaaagcagttgctgagattactaaagggaatgtgaaagctgaaaatacgggcgaaaaaggttcttttagtaatttaggcaattgtataatgatataaaaataaaatatttgagctaatattaaaaatataattacgataaaagcattcgccttaggaaaggctataacatatgctgcagcgactaaagaaaatggtgcacaaattgtcgatgtgttcggtttgattgacgtctgcaatggaaatgcttttaatcgcttgaaaacaataggtaagacaatacaagtagctacaaagccatatattactgttaattgacctatgaaaaaacatccgctaacgggtgccgtcaatcctgcgatagcaataccaataaaaagtacagtccacgaaggataaacattttcaagtgaaaaatcttttaaatattttattgaaaaaataatcatatgcgtcataattcccacaaggcataaaatccaaataggcgttattaagctattgataaaagttatgttactaaaaaatgtatttaaataagtagtacctaaaaagccagacatgaaaaatgttgtgaacactgatgaaactagaggactgtttaattgttctttcacattattaaaatatttgatcatagtacataaaaggtgaatccaaatcaagaaagcaaagattccgcaaacagcgtttaaagtaagagataagtcttttaatagattacccaggcctaataatcctaagactagtcctgacgttactagaggtgctttttgaagtctcatgatttacaacctttcttatgtgattttcttcactaattatatcatgatagctatggccaattaataagaagagtgtgtactattacgttattagagtatgtatattggattgatagacacataattgacatttaaatctcaaaattaatgatatttgaggtatgctttgcaacctaaatattggaatatgtggaaaagtaattatttaatttaaatgatgattgaagatttacaagggggtgtacaaaatgagaaatcaaattcaaaaactattagacagtgatttgagcagtttacatatatcgaaacaaacaggagttccacaaagcacaatacacagaatgagaaaaaaagaaagatcattagacaatatgtcattgaaaaacgctgaactactttataaatttgccaatagtatatttagcaatgaaaattaagaagaataattagtgagttaaataattaaaaaaccacgtctcgatggacgtggttatttttttaaatgtatttaattataggatttcgggcccctgaaaagtccctaaaattttgaatagtatcaaaatctataggaataatataataataaaaatctctacgcatgcaaatggtgagtgttaaaaatcttggtgtagtgttggtgtagttcaggtgcagtatagatgaaatttgagcacaaaattacttaattaaaaatgtataaacaagtgtcagacgcgtgtcaattgtgtgtcaaaaaattctatgacgaataagcatgcttgttttaattactgtattttcggggcttatgcgggggacgttttggtgacgcatcatactatattactgaaattcaaaacaaaaagagccccgtaatcacggaactcttttgtttggtaatgcgtataaaaatacctataaacgtcctgggagggattcgaacccccgaccgatggcttagaaggccattgctctatccagctgagctaccaggacacgtttaacaacacaagaattattatatctaaatgaacttaaattagcaataccttgtaaataaaaaatgtttatatttttcactattatagagctatttatctaaaaaggttcaataagacttaaatgcgaattcaggcaacttaattgtgttaaatacagttttgaatgcctaactgtatttcttttctctttaaaatacagttaagtacattataagatgttgtgcggataaacaaactaattgcatcaaatttattttaaaataacaacaacaaaacgttaagcgaataacatttcggtgatttaaaagctacgcacgtttttgttatcttcaaatttaaattttaaggagtgttttcaatggaaggtttatttaacgcaattaaagataccgtaactgcagcaattaataatgatggcgcaaaattaggcacaagcattgtgagcatcgttgaaaatggcgtaggtttattaggtaaattattcggattctaatttcaatatgttatgtaagtaatcagtattatttcaaaggtgagggagagatttaaatgactggactagcagaagcaatcgcaaatactgtgcaagctgcacaacaacatgatagtgtgaaattaggcacaagtatcgtagacatcgttgctaacggtgtgggtttactaggtaaattatttggattctaatataataactaatattctttaaaataaactgggtgagcatactttaatgttatgcactcagtttattttatttgcagaaatttgagcctctgttaagatttagatacatagacaatataggagatggggaaattgggatataaaaatattttgatagactttgatgatacaattgttgatttttatgatgcagaagaatgggcgtttcactatatggcgaatgtttttaatcataaagcaacaaaggatgattttttaatatttaaaaaaatcaatcaccaacattgggaagcttttcaacaaaataaattaacgaagtctgaagtattatcagaacgatttgtgaattacttcaaacatcatcaaatggaagttgatgggcatcgtgcagatgtgttatttagaaatggattagcagaagctaaagttaaatactttgatcaaacattagaaacaattgtcgaattatcgaaaagacatgatttatatattgttactaatggtgtaaccgaaacgcaaaagagaaggttaaatcagacgccgttgcataaatatattaaaaagatatttatatctgaggaaacaggatatcaaaaacctaatccggaattttttaattatgtttttaatgatattggtgaggatgaaagacagcactcgattatagttggagattctttaacatctgacattctaggtggaatcaatgcgggtatagctacttgctggtttaattttagaggatttgatcataatccaggaattatacctgattatgaaattaattcatggaaacaactaaatgatattgtacgttaagacaaataatttgaaaatgatttacttatattagcttaagaaagtaattgtaaaaacgacactacgaaaagatgcattttcatgctcgtagtgtcgaatattattatcttatggtttccacaataagacatcatgtccctctatatttttagcttccacatctgtaaatccatgatgtaaaaagaaatccttagaatcatttctgccaatggctttaattggcatattgaaactctttgcaaaatcaatcaattctgaagcgtaccctctgttttgatattttggtaatacttctaacttccataataatatataatcttcaaaatctgggaagtagatttcttcgacatcacctttttttagtaatgccattctagctcctaattgatctccgacaaatatgccataaaatggtgaatctgaacttgcatcaatcatttgaccgtttaactcattgaccatgtataagtctttgttgccaaacgctctaaagttttcgaataattcgtcagttttgtaattaatttcaagacgtttgatttcactcatatttatctaccccttatttgtttactactattattatacattaaaccacttgtgtttttcattgatttgaaaatgtaaaacaatgaacattataaattttccatgattaaattgattttcaagccgtaaaattgtcaatcaccggtatagactttatactatagtttgtaatcgcgtacttaaggagaaaaaacatggactgtaaagtagttagtttaaatgaaaaagatcagtttataccaaaaataaagagcagtgaccctgtaataacaggattatttcaatatgatgcagctcaacaaactagttttgaaaaaaggatgtctaaagaaaataatggaagagaagcggcattagcgaatgttattcgtgaatatatgagtgatttaaagctttcaaatgaacaagaattaaacatacaacatttagctaatggttcaaaagttgtgattggtggacaacaagcagggcttttcgggggaccattgtatacattccataaaatattttcaatcattactttatctaaggaattaacggatacacataagcaacaagtagtaccagttttttggattgcaggagaagatcatgatttcgatgaagtgaatcatacatttgtttataacgaaaatcatgggtcgctgcataaggttaaatatcatacaatggagatgccagagacgacagtctctagatattatcctgataaggctgagttgaaacaaactttaaaaacgatgttcattcatatgaaagaaactgttcatacacaaggtctactggagatttgtgacagaattattgaccaatatgactcgtggactgatatgtttaaagcactactgcatgaaacatttaaagcatatggcgttctatttatagatgcgcagtttgagccgttaagaaaaatggaagcgcctatgtttaaaaagattttgaaaaaacatcagttgcttgatgatgcttttagagcaacacaacaacgtactcaaaatcaaggcttgaatgcgatgatacaaacagatacaaatgttcatttattcttacatgatgaaaatatgcgccaattagtttcgtatgatggtaagcattttaaattaaataaaacagataagacatatataaaggaagaaattataaatattgcggaaaatcaacctgaattattttctaataatgtagtgacaagaccattaatggaagaatggttatttaacacggtggcatttgttggaggaccgagtgaaattaagtactgggctgaactaaaagatgtatttgaactatttgatgttgaaatgcctatcgtgatgccaaggcttagaattacttatttaaatgaccgtatagaaaaattactttcgaaatacaatattccattagaaaaagtgttagtcgatggtgttgaaggagaaagaagtaagtttattagagaacaagcatcacatcaatttattgaaaaggtagaaggtatgattgaacaacagcgtcgtctaaacaaagacttattagatgaagtggcggggaatcaaaataatattaaccttgtgaataaaaataatgaaattcatatacaacagtatgattatttgttaaaacgttatcttttaaacattgaaagagaaaacgacatcagtatgaagcaatttagagaaattcaagaaacactccatccaatgggaggattacaagaaagaatatggaatccacttcaaattttgaatgattttgggacagatgtgttcaagccctccacctatccaccactttcttacacttttgatcatattattataaaaccttaatataccaagggtttagcccgatttatcttaatgataaatcgggcatttttttgttttttaaaataaatttcacaaattttgtataaatagtggtggatagtggggagatgtggtaaattatatataaggtgaggtgataaaaaatgttcatgggagaatacgatcatcaattagatacaaaaggacgtatgattataccgtccaagtttcgttatgacttaaatgagcgttttattatcacaagaggccttgataaatgtttattcggttacactctagacgaatggcaacagattgaagagaaaatgaaaaccttacctatgacaaaaaaagacgcacgtaagtttatgcgtatgttcttctctggtgctgttgaagtagaacttgataagcaagggcgtattaacatccctcaaaacttgaggaaatacgctaatttaactaaagaatgtacagtaatcggtgtttcaaatcgtattgagatttgggatagagaaacttggaatgatttctatgaagaatctgaagaaagtttcgaagatattgctgaagatttaatagattttgatttttaaaatggaggaattgaagtgtttcatcatatcagcgttatgttaaacgaaaccattgattatttaaatgtaaaagaaaatggtgtgtacattgactgtacgctaggtggagcgggacatgccctttatttactaaatcaattaaatgacgacggaagattaatagcaatcgatcaagaccaaactgcaattgataatgctaaagaggtattaaaggatcatttgcataaggtgacttttgttcatagcaacttccgtgaattaactcaaatattaaaagacttaaacattgaaaaagtagatggaatttattacgacttgggtgtttcaagcccacaactcgacattccagaacgaggattcagttatcaccatgacgcaacattagacatgcgtatggaccaaacacaagaactaacagcatatgaaattgttaacaattggtcatatgaagcgttagtgaagattttttatcgttatggcgaggagaaattttcaaaacagatagctcgaagaatcgaagcacatcgtgaacaacaaccaataacaacaacattagaattagttgacattataaaagaaggtattcctgcaaaagcaagaagaaaaggcggacatcctgcaaaacgagtatttcaagcactacgaattgcagtaaacgatgaattgtcagcttttgaagattcaatagaacaagcgattgaattagtgaaagtagacggcaggatttcggtaatcactttccattctttagaagatcgtttatgtaaacaggtgttccaagaatatgaaaaaggtccagaggtaccaagaggattgccagttataccagaagcatatacacctaagttaaagcgtgttaatcgtaaaccgattaccgctacagaagaagatttagatgacaataacagagcacgaagcgcgaaattacgtgtagctgaaatacttaaataaggagcaatttataatggctgtagaaaaagtgtaccaaccatatgacgaacaagtttataatagtataccgaagcaacaaccacaaactaagcccgaaaagaagactgtttcgagaaaagtggttgtacaattaactaaatttgaaaaagttttatacataactttgattactgtaattgctatgttaagtatttatatgctatctttaaaaatggatgcgtatgatacgcgaggaaagattgcagatttagattataaaatagataaacaatcaagtgaaaacagtgctttacaatctgaaatcaaaaagaattcttcttatgaacgcatatacgaaaaggctaagaaacaggggatgagccttgagaacgataatgtaaaggtagtgcgtagtaatggcgaagcaaaaaattaaaattaaaaaaaataaaataggggcagtcctacttgttggtttattcggactgctcttttttatattggttttaagaatttcatatatcatgattactggacattctaatggtcaagatttagtcatgaaggcaaatgaaaagtatttagttaagaatgcacaacaaccagaacgaggaaagatatatgatcgtaatggtaaagtgctagcagaagatgtagaaagatataaacttgttgcagtaatagataaaaaggcgagtgccaattctaaaaaacctaggcatgtagttgataaaaaagagactgcaaagaaattatctacagtcattgatatgaagccagaggaaattgaaaagagacttagtcaaaagaaagctttccaaattgaatttggacgcaaaggaacaaatttaacgtatcaggacaaattgaaaatagagaaaatgaatttgcctggtatttctttattgcctgaaacagaacgcttttatccaaatggcaattttgcatcacacttaattggtagagctcagaaaaatccggatactggtgaacttaaaggtgcacttggagttgaaaagatttttgatagttatttaagtggatctaaaggatcattgagatatattcatgatatttggggatatatcgcaccaaatactaaaaaagagaagcagcctaaacgtggtgatgatgtccatttaacaatcgattcaaatattcaagtatttgttgaagaagctttagatggcatggttgaaagataccagccgaaagatttatttgcggttgtcatggatgccaaaactggagaaattttagcatacagtcagcgaccaacatttaatcctgaaactggtaaagactttggtaaaaagtgggcaaatgacctttatcaaaacacatacgagcctggatcaacatttaaatcatatgggttagcagctgctattcaagaaggtgcttttgatcctgataagaaatataaatctggacatagagatattatgggttcacgtatttcagactggaatagagtcggttggggtgaaatcccaatgtcactcggatttacttattcatctaatacattgatgatgcatttacaagatttagttggtgcagacaaaatgaaatcttggtatgaacgatttggatttggaaaatcaactaaaggtatgtttgatggagaagcacctggtcaaattggatggagtaatgagttgcaacaaaaaacgtcatcatttggtcaatcgacaacagtaacacctgttcaaatgttacaggcgcaatcagcgttctttaatgatggtaatatgttaaaaccatggtttgtgaatagcgttgaaaatcctgttagtaaaagacaattttataaaggtcaaaaacaaatcgcaggcaaaccaataacaaaagatactgctgaaaaagttgaaaagcaattggatttagttgtgaatagtaagaagagtcacgctgcaaactatcgtattgatggttatgaggtcgaaggtaagactggtacagcacaagtcgctgcacctaatggtggtggatacgttaaaggtccaaacccatattttgtaagttttatgggtgacgcaccgaagaaaaatcctaaagttattgtatacgctggtatgagcttggcacaaaaaaatgaccaagaagcttatgaattaggtgttagtaaagcgtttaaaccaataatggaaaatactttgaaatatttaaatgtaggtaaatcaaaagatgacacatctaatgcagagtatagtaaagtgccagatgttgaaggtcaagacaaacaaaaagctattgataatgtgagtgcaaaatcattagaaccagttactatcggttctggcacacaaataaaagcacaatctataaaagcagggaataaagtcttacctcatagtaaagtactgttattaacagacggagacttaactatgcctgacatgtcaggatggacgaaagaagatgtcattgcttttgaaaacctaacaaatattaaagtaaatttaaaaggtagcggttttgtgtcccaccaatcaattagtaagggacaaaaacttactgaaaaagataaaatagacgtagaattttcatcagagaatgtagacagcaattcgacgaataattctgattcaaattcagatgataagaagaaatctgacagtaaaactgacaaggataagtcggactaacaagaatggctacattaaataagggtgtattgtcactatttgtttttactaaagtaatgctgtgatagaaaaaaacatcttcatttaatctttataaataagtgttgatagagaattttaaggtagacgaggtcagattaacttgtttgttataggcaaactttttatactggcctcttatgccgtaaaaaagaaaaattataaattttgattacaactttgtttatttaattgaaaaattgataatatattagtggttaaaaaagtctggattaagaagaggagatagttatgatttttgtatatgcgttattagcgctagtgattacatttgttttggtacctgttttaatacctacattaaaaaggatgaaatttggtcaaagtattcgagaagaaggtccacaaagccatatgaagaagactggtacaccaacgatgggtggactaacatttctattaagtattgtgataacgtctttggtggctattatatttgtagatcaagctaatccaatcatactgttattatttgtgacgattggttttgggttaattggttttatagatgattatattattgttgttaaaaagaataaccaaggtttaacaagtaaacagaagtttttggcgcaaattggtattgcgattattttctttgttttaagtaatgtgtttcatttggtgaatttttctacgagcatacatattccatttacgaatgtagcaatcccactatcatttgcatatgttattttcattgttttttggcaagtaggtttttctaatgcggtaaatttaacagatggtttagatggattagcaactggactgtcaattatcggatttacaatgtatgccatcatgagctttgtgttaggagaaacggcaattggtattttctgtatcattatgttgtttgcacttttaggatttttaccatataacattaaccctgctaaagtgtttatgggagatacaggtagcttagctttaggtggtatatttgctacgatttcaatcatgcttaatcaggaattatcattaatttttataggtttagtattcgtaattgaaacattatctgttatgttacaagtcgctagctttaaattgactggaaagcgtatatttaaaatgagtccgattcatcatcattttgaattgataggatggagcgaatggaaagtagttacagtattttgggctgttggtctgatttcaggtttaatcggtttatggattggagtgcattaagatgcttaattatacagggttagaaaataaaaatgtattagtcgtcggtttggcaaaaagtggttatgaagcagctaaattattaagtaaattaggtgcgaatgtgactgtcaatgatgggaaagacttatcgcaagatgctcatgcaaaagatttagaatctatgggtatttctgttgtaagtggaagtcatccattaacattgcttgataataatccaataattgttaaaaatcctggaataccttatacagtatctattattgatgaagcagtgaaacgaggtttgaaaattttaacagaagttgagttaagttatctaatctctgaagcaccaatcatagctgtaacgggtacaaatggtaaaacgacagttacttctctaattggagatatgtttaaaaaaagtcgcttaactggaagattatccggcaatattggttatgttgcatctaaagtagcacaagaagtaaagcctacagattatttagttacagagttgtcgtcattccagttacttggaattgaaaagtataaaccacacattgctataattactaacatttattcggcgcatctagattaccatgaaaatttagaaaactatcaaaatgctaaaaagcaaatatataaaaatcaaacggaagaagattatttgatttgtaattatcatcaaagacaagtgatagagtcggaagaattaaaagctaagacattgtatttctcaactcaacaagaagttgatggtatttatattaaagatggttttatcgtttataaaggtgttcgtattattaacactgaagatctagtattgcctggtgaacataatttagaaaatatattagcagctgtgcttgcttgtattttagctggtgtacctattaaagcaattattgatagtttaactacattttcaggaatagagcatagattgcaatatgttggtactaatagaactaataaatattataatgattccaaagcaacaaacacgctagcaacacagtttgccttaaattcatttaatcaaccaatcatttggttatgtggtggtttggatcgagggaatgaatttgacgaactcattccttatatggaaaatgttcgcgcgatggttgtattcggacaaacgaaagctaagtttgctaaactaggtaatagtcaagggaaatcggtcattgaagcgaacaatgtcgaagacgctgttgataaagtacaagatattatagaaccaaatgatgttgtattattgtcacctgcttgtgcgagttgggatcaatatagtacttttgaagagcgtggagagaaatttattgaaagattccgtgcccatttaccatcttattaaagggtgtgagtattgatggatgataaaacgaagaacgatcaacaagaatcaaatgaagataaagatgaattagaattatttacgaggaatacatctaagaaaagacggcaaagaaaaaggtcaaaggctacacatttttctaatcaaaataaagatgatacatctcaacaagctgattttgatgaagaaatttacttgataaataaagacttcaaaaaagaagaaagcaatgatgaaaataatggttctgcttctagtcatgcgaatgataataatatcgatgattctacagactctaatattgaaaatgaggattatagatataatcaagaaattgacgaccaaaatgaatcgaatggaattgcagtcggcaacgaacaacctcaatcagctcctaaagaacaaaatagcgactcgaatgatgaggaaacagtaacgaaaaaagaacgaaaaagtaaagtaacacaattaaagccattaacacttgaagaaaagcggaagttaagacgtaagcgacaaaaacgaatccaatacagtgttattacaatattagtattgttgattgctgttatattaatttacatgttttcaccacttagtaaaattgcgcatgtaaatataaatggaaataatcacgttagtacttcaaagataaacaaagttttaggtgttaaaaatgattcgaggatgtatacgtttagtaaaaaaaatgctattaatgatctcgaagaggatccattaatcaaaagtgttgagatacacaagcaattaccaaacacattaaacgtagatatcacagaaaatgaaattattgctttagtgaaatataaaggtaaatatttacctttattagaaaatggtaaattgcttaaaggttcaaatgatgtcaaaattaatgatgcacctgtcatggatggtttcaaaggtacaaaagaagatgatatgattaaggcgttatctgaaatgacacctgaagttagacgatatattgccgaagtgacatacgccccaagtaaaaacaaacaaagcagaattgaattgtttacgacagatggacttcaagtaatcggtgatatttcgacgatatctaagaaaatgaaatattatccgcagatgtcacaatcattatcaagggatagttcgggtaaactaaaaacaagaggctatattgatttatcagtcggtgcttcatttatcccataccgtggaaacacgtctagtcaatcagaaagcgataaaaatgtgactaaatcatctcaagaggaaaatcaagcaaaagaagaattacaaagcgttttaaacaaaattaacaaacaatcaagtaagaataattaaaaaattttgatattgtctatgtttatagttcacaagccattcaacgtattgtaaactaaggatagtgtatttttttaatagtaatttgtcaggaggtgcctatctatggaagaacattactacgtaagtattgatattggatcatcaagcgtaaaaacaatagtaggcgagaaatttcacaatggtataaatgtgataggtacaggacaaacctacacgagcggtataaaaaatggtttaattgatgattttgatattgcgcgacaagcaatcaaagacacaattaaaaaggcatcaatcgcttcgggtgttgatattaaagaagttttcctgaaattacctatcattggaacggaagtttatgatgaatcaaatgaaatcgacttttatgaggatacagaaatcaacggttcacatatcgaaaaagtattagaaggtattagagaaaaaaatgatgtgcaagaaacagaagtaattaatgtgttcccgattcgttttatagtcgataaagaaaatgaggtttcagaccctaaagaattaattgccagacattcattaaaggttgaagcaggcgtaattgctattcaaaaatcgattttaattaatatgattaaatgcgtagaagcatgtggtgttgatgtattagatgtttactctgatgcatataactatggttcaatcctaacagctactgaaaaagagttaggtgcatgtgtcattgatattggtgaagacgttacgcaagttgctttttatgaacgcggtgaattagtagatgctgattctatcgaaatggcagggcgtgatattacagacgatattgcacaaggattaaacacttcttatgaaactgctgaaaaagttaaacaccaatatggtcatgcattctatgattctgcttcagatcaagatatcttcactgttgaacaggttgatagtgatgaaacagtacagtatactcaaaaagatttgagtgactttattgaagcgcgtgtagaagaaatattcttcgaagtatttgatgttttacaagatttaggattaacaaaagtaaatggtgggtttattgtaactggtggatctgcaaacttacttggcgtaaaagaattattatcagatatggtaagtgaaaaagttagaattcacacgccatcacaaatgggaattagaaaacctgaattttcttcagcaatttctacaatttctagtagtatcgcttttgatgagttattagattatgttacaattaattatcatgataatgaagaaactgaagaagatgttattgatgtgaaagacaaagataacgaatctaaattaggcggatttgattggtttaaacgtaaaacaaacaaaaaagatactcatgaaaatgaagtagagtcaacagatgaagaaatttatcaatcagaagataatcatcaggaacataaacagaatcatgaacatgttcaagacaaagataaagataaagaagaaagtaaattcaaaaaactaatgaaatctctatttgaatgattattggccaataaaactaggaggaaatttaaatgttagaatttgaacaaggatttaatcatttagcgactttaaaggtcattggtgtaggtggtggcggtaacaacgccgtaaaccgaatgattgaccacggaatgaataatgttgaatttatcgctatcaacacagacggtcaagctttaaacttatctaaagctgaatctaaaatccaaatcggtgaaaaattaacacgtggtttaggagcaggagctaaccctgaaatcggtaaaaaagctgcagaggaatctcgtgaacaaattgaagatgcaatccaaggtgcagacatggtatttgttacttctggtatgggtggcggaactggtactggtgcagcaccagtcgttgctaaaattgcaaaagaaatgggcgcattaactgttggtgttgtaactcgtccatttagttttgaaggacgtaaacgtcaaactcaagctgctgctggagtagaagctatgaaagctgcagtagatacattaatcgttataccaaatgaccgtttattagatatcgttgacaaatctacgccaatgatggaagcatttaaagaagctgataacgtgttacgccaaggtgtacaaggtatctcagacttaatcgctgtttctggtgaagtaaacttagactttgcagacgttaagacaattatgtctaaccaaggttctgcattaatgggtattggtgtttcttctggtgaaaatagagcggtagaagctgctaaaaaagcaatctcttctccattacttgaaacatctatcgttggtgcacaaggtgtgcttatgaatattactggtggcgagtcattgtcattatttgaagcacaagaggctgctgatattgtccaagatgctgcagatgaagacgttaatatgattttcggtacagttattaatcctgaattacaagatgagattgttgtaacagttattgcaactggttttgatgacaaaccaacatcacatggtcgtaaatctggtagcactggattcggaacaagcgtaaatacttctagcaatgcaacttctaaagatgaatcattcacttcaaattcatcaaatgcacaagcaactgatagtgtaagtgaaagaacgcatacaactaaagaagatgatattccaagcttcattagaaatagagaagaaagacgttcaagaagaacaagacgttaatcggttaatatatatacacaaataattcaacacaaatcatcagataacatatctgatgatttttttactaatttttagaacatgtagaaggacatttaagtttttcgaagtcattaaaagtgtttaagtatcgtgtcaaaattaagtcaaaaattatttgcgcaacattttaactttaaacataaatgttatattatataattattaactttgtacagttagacgaagataatttaaatgaaatgatggtgacgatcgagtgaatgataattttaaaaagcaaccgcatcatttaatatatgaagaattattacaacaaggtattactctaggtattacaactagaggagatggtttaagcgactatcctaaaaatgcttttaatatggcgagatatattgatgatcgcccatataatattactcaacatcaattgcaattagctgaagaaattgcgtttgatagaaaaaattgggtgtttcccatccaaacacatgaaaataaagtcgcttgtattacaaaggatgatataggcacaaatatagacactttaactgatgcgcttcatggtattgatgcgatgtacacatatgatagtaatgtcttattaacgatgtgttatgcagactgtgtaccagtatatttttatagtacaaaacatcattttattgcattggcgcatgcaggttggcgtggtacctatactgaaattgtaaaagaagtgctaaaacatgtgaactttgatttgaaagacttacatgtcgttattggaccatctacatcatcaagttatgaaattaatgatgatattaaaaataaatttgaaacattgccaattgatagtgccaactatattgaaactagaggacgagatcgtcatggtattgatttgaaaaaagccaatgctgaattattaaattattatggtgttcctaaagaaaatatttatacgacagcgtatgctacatctgaacatttagaattatttttctcttatcgattagaaaaaggtcaaacaggacgcatgttagcattcattggtcaacagtaaacaaggaggagatatgtttgcgtgtgaaagataatttacaacaaatctcaacacaaattaatgacaaaagtgaaaaaaataatttttcaacaaaaccaaacgtgattgcagttacaaaatatgttacaatagagcgagctaaagaagcgtatgaggctggaataagacattttggtgagaatagattggaaggcttttttcaaaagaaagaagcattaccatcagatgcggtgattcattttataggatcattacaatctcgaaaagttaaggacgttataaacgacgtagattatttccatgctttagatcgattgagcttagccaaagaaattaacaaacgtgcagaacataaaattaaatgtttcttgcaagtgaacgtttcgggagaagcttctaaacatggtattgctttagaagatgttgatcagtttatagatgatcttaaaaaatatgacaaaatcgaaattgtaggtttaatgacgatggcaccattgacagatgatgaagcatatattagatcgttatttaaacagttacgtttgaaaaaagaagaaatacaacgactcaatttagaatatgcgccttgtgatgaattatcaatgggaatgagtaatgactatcttattgcagttgaagaaggtgcgacgtttgttagaattgggactaaacttgtaggagaagaggagtgagccacttggctttaaaagatttatttagtggattttttgtaatagatgatgaagaggaagtagaagtacctgacaaacaacaacaggtcaatgaagcgccagcaaaagagcagtcacaacaaacaacaaaacaaaacgcaatcaaatcagtccctcaaaaatctgcatcaagatatacaacaacgtcagaagaaaggaataaccgtatgtctaattattcaaaaaataattcacgtaatgttgtaactatgaacaatgctacaccaaacaatgcatcacaagaaagttcaaaaatgtgtttattcgaaccacgtgttttttcagatacacaagatattgctgatgagcttaaaaaccgccgtgcgacacttgtcaatttacaacgtattgataaagtatcagcgaaaagaattattgattttttaagcggtactgtttatgcaatcggtggagatatccaacgtgtaggtactgatattttcttatgtacgcctgataatgtggaagtagctggaagcattacagaccatattgaaaatatggaacattcattcgactaaggagttaacatatggatataaatgtgctagctacaatatttaaatttatcctttttgttgttgaaatttattatttcggcatgattatatatttctttacatcttgggtaccaagtattagagaaactaaggtaggttattttttagcgaaaatatatgaacctttcttacaaccatttagaaaagtaattccacctattggaattatcgacatatcatcaatcgctgcaattatcgttttagtattattccaaaaagggttactccaaatctttaattggattttaattcaattacaataaattaagcgacataacgaggcaagggtacatgatactttagcctcgtttttgatatgtatttttctgaatataagggcaatagatggtattttataatttttttaaggtagtgattaacatagatatttatcaacactttagacaggaagaatacgaattaattgatcagctaacggataaatgtgatcaagcggaacaacattatgcaccagtattaacgcattttttagatccaagagggcaatatatattggaagtgatttgtggcagttatgaagatttaaacgtctctttttatggcgggcctaatgctgaaagaaaaagagcaatcatttcgccgaactattatgaacctaaagaaagtgactttgaattaactttaatggaaatagagtatcctgaaaaattcgtcactttaaaacatcaacatattttagggacattaatgtctttaggtatcgaacgcgaacaagttggagatataattgtgaatgaacgaattcaatttgttttgacaagtagattggaatcatttattatgttagaattacaacgtattaaaggcgcatcagttaaactttatactattccagtaacagatatgatacaatctaatgagaattggaaaaatgaaagtgcaacagttagttctttaaggttagatgttgttattaaagaaatgatacgtaaatcacgtacgattgcgaaacaactaattgaaaaaaaacgtgttaaagtgaatcacactattgttgattcagcagattttcaattacaagcaaatgatttaatatccatccaaggttttggtagagcacacattactgacttaggtggtaaaactaaaaaagataaaacgcacattacctatagaacattattcaaatagtaatgatttaaggaggataacaaatgccttttacaccaaatgaaattaagaataaagagttttcacgtgtaaagaatggtttagaacctactgaagttgctaattttttggagcaactaagcactgaaattgaacgtcttaaagaagataaaaaacaacttgaaaaagtaatcgaagagagagatactaatattaagtcttatcaagacgtgcatcaatctgtaagtgatgctttgatacaagctcaaaaagctggtgaagaaactaagcaagctgcagagaaacaagctgaagcgattatagctaaggcagaagcgcaagctaatcaaatggttggtgacgcggtagaaaaagcacgccgtttagcattccagactgaagatatgaaacgtcaatcaaaagtatttagatcgcgtttccgtatgttagttgaagcgcaattagacttattaaaaaacgaagattgggattacttgttgaattatgatttagacgctgaacaagtgacgcttgaaaatattcatcatttgcatgaaaatgatttaaagccagatgaagttgcagcaaatgcacaaaataatgcatcaaatacaccagacaataatcaacaatccaatgattcagaaacaactaagaagtaagaattaaataaagacagacgcgtaatatacatttaacttttcacagcgaattaggtaatggtgagagcctagtaaaagcatgtatgttatatcactggctttttaatatttaaataatgtaatgagagaactctaagttgagttaataagggtggtaccgcgagcaatcgtcccttttaatttaacttagagttttttaaatttttaaggagtgaaaaaaatggattacaaagaaacgttattaatgcctaaaacagatttcccaatgcgaggtggtttaccaaacaaggaaccgcaaattcaagaaaaatgggatgcagaagatcaataccataaagcgttagaaaaaaataaaggtaacgaaacattcattttacatgatggcccaccatacgcgaatggtaacttacatatgggacatgccttgaacaaaattttaaaagactttattgtacgttataaaactatgcaagggttctatgcaccatacgtaccaggttgggatacacatggtttaccaattgaacaagcattaacgaaaaaaggtgttgaccgaaagaaaatgtcaacagctgaattccgtgagaaatgtaaagaatttgctttagaacaaattgaattacagaaaaaagattttagacgtttaggtgttcgtggtgactttaatgatccatatattacattaaaacctgaatacgaagctgcacaaattcgtatttttggagaaatggcagataaaggtttaatttataaaggtaaaaagccagtttattggtctccttcaagtgagtcttcattagcagaagcagaaattgaatatcacgataaacgttcagcatcaatttacgttgcatttgacgttaaagatgacaaaggtgtcgttgatgcagatgctaaatttattatctggacaacaacgccatggacaattccatcaaatgttgcgattaccgttcatcctgaattaaaatatggtcaatacaatgtaaatggcgaaaaatatattattgcagaagccttgtctgacgctgtagcagaagcactggattgggataaagcatcaatcaaattagaaaaagaatacacaggtaaagaattagagtatgttgtagcacaacatccattcttagacagagaatcgttagtgattaatggtgatcatgttactacagatgctggtacaggttgtgtacatacagcaccaggtcacggggaagatgactatattgttggtcaaaaatatgaattgccagtaattagtccaatcgatgataaaggtgtatttactgaagaaggcggccaatttgaagggatgttctatgataaagctaataaagccgttactgatttattaacagaaaaaggtgcactattaaaattagactttattacacatagctatccacacgactggagaacaaaaaaacctgtaatcttccgtgctacaccacaatggtttgcctcaatcagtaaagtaagacaagatattttagatgcaatcgaaaatacaaacttcaaagtaaattggggtaaaacacgtatttacaatatggttcgtgaccgtggcgaatgggttatttctcgtcaacgtgtgtggggtgtaccgttaccagtattttatgctgaaaatggcgaaattatcatgacgaaagaaacagtgaatcatgttgctgatttatttgcagaacacggttcaaatatttggtttgaaagagaagcgaaagacttactaccagaaggatttacacatccaggcagccctaacggtacatttactaaagaaacagacattatggacgtttggtttgattctggttcatcacaccgtggcgtgttggaaacaagaccggaattaagtttcccagcggatatgtatttagaaggtagtgaccaatatcgtggttggttcaactcttctatcacaacttcagttgctacaagaggagtatcaccttataaattcttactttctcatggttttgttatggacggtgaaggtaagaaaatgagtaaatctttaggtaatgtgattgtacctgaccaagtggttaaacaaaaaggtgctgatattgcgagactttgggtaagtagtacggactatttagctgatgttagaatttctgatgaaattttaaaacaaacatctgatgtttatcgtaaaatcagaaatacattaagatttatgttaggtaacattaacgatttcaatcctgacacagatagcattcctgaatcagagttattagaagtggatcgttacttgctaaatcgtttacgtgaatttactgcaagtacgattaacaactatgaaaactttgactacttaaatatttatcaagaagttcaaaactttatcaatgttgagttaagtaatttctatttggattacggtaaagatattttatatattgaacaacgtgattctcatatccgtcgtagtatgcaaacagtgttatatcaaattttagttgatatgacgaagttgttagcaccaatcttagtgcatacagctgaagaagtttggtctcatacaccacatgttaaagaagaaagtgttcacttagcagacatgcctaaagttgtagaagtagatcaagctttattggataaatggcgtacatttatgaatttacgtgatgatgtgaaccgtgcattagaaactgctcgtaatgaaaaagttattggtaaatcattagaagctaaagttacgattgctagtaacgataaatttaatgcatctgaattcttaacttcatttgatgcattacatcaattatttatcgtgtcacaagttaaagttgtagataagttagatgatcaggcaacagcttatgaacatggtgatattgtcatcgaacatgcagatggtgaaaaatgtgaaagatgttggaactattcagaggatcttggtgctgttgatgaattgacgcatctatgtccacgatgccaacaagttgtaaaatcactggtataattgaaattgtataaagtacttatacagatgatataaattaaagctctcttcataatcatgttgtagtttttgttgacatgatgaagagagtttttttgtgaataaaaaaatgaccaagttactggttatatgtgttaaaaaatgtgtaatttactaaaataaaaattattcaggaatggtacaaattctctgaagcttataaatgcgttatagttgctattctcaattatgttcgcgataattttaagtaaaagtaagcacagatattgaatttgataggagttaattgaatgtatcataacagtaacgcaaactttgtaaatggtatcactttaaatgtgagagataagaatgaattaaagccattttatgaggacgtattaggattaaatattataaatgagacattaacatcgatacaatatgaagtaggtcaaaataatcatgtcattacacttgttgaattacaaaatggacgtgaacctttaatgtccgaagcgggactgtttcatatcgcaattaaactacctcaaattagtgatttagctaatttactaattcatttaagcgaatatgatattccagttaacggaggtatacagcctgcttcgttatcattattttttgaagacccagaaggaaacggttttaaattttatgttgataaagacgaagcgcaatggacgaggcaaaatgatttagtaaaaattgatattagaccattaaatgtaccgagattagtgagtcatgcaacaaaattgttatggttaggtattccagatgacgctattataggtgcattgcatattaagacaattcatttatcagaggtaaaagagtactacctcgattattttggattagagcaatcggcatatatggatgattattcaatatttttagcatcgaatggctattatcaacatttggccatgaatgattgggtatcagcaacgaaacgtgtagaaaattttgatacgtatggattagcaattgttgactttcattatcctgaaacaacacatttaaatttacaaggtccggatggtatctattatcgctttaatcatatcgaagttgaagattagtatatactttgaatggacgaaccatataatgaatcgtttttaatgatctttttatacaagttatgaaggaggctgggacattaagttcttaggcaatgtaaaaagctgatttctattaattatttgatagaaatcagcttttttgatatgtattttataatgtacagctcgttgagctgctattttccttatattaagtgccattaatacaaaacctagctctcgtttaactttatttattcctcgaactgacattcgagtgaaactcaaaatagcctactttcttaaattaacaatatctattctcatagaatttgtccaattaagtgtagacgattcatgtcttatttttttaaagtatttaaaagtaaaattacatgttaatacgtagtattaatggcgagactcctgagggagcagtgccagtcgaagaccgaggctgagacggcaccctaggaagggacccatcatcaaaaattctatttatagaattttacagtaatgtgccagatgggcatagcgaagccattcaatacgaagtattgtataaatagagaacagcagtaagataatttttaattagaaaatatcttactactgtctttttagggatttatgttccagcctgctttcctaatttttaatgtcatcttaaatatgataaatgaataattaagttcatatttaatgtcaaaacatagtagtttatcaagtattgagtgagtaacattagatttaatgtaatatgcttactttttttattagcaggtgtaagctataatataaagagttgtcttatggacgattgattggaggaacgaaaatgcacaaaaaatattttattggcacttccattttaatagcagtatttgtcgttatatttgaccaagttactaaatatattatagctactacaatgaaaattggagattcatttgaagtgataccgcactttttaaacataacatcacatcgaaataatggtgctgcatggggaatattgagtggaaaaatgacatttttctttattattaccattattatattaatagccttagtatatttctttattaaagatgctcaatataatttgtttatgcaagttgctattagtttactttttgcaggtgcacttggaaactttattgatagaattttaacaggagaagttgttgactttattgatacaaatatttttggttatgattttccaatatttaatatagcagattcaagtttaacaattggtgtaatattaattattattgccttattaaaggatacttccaataaaaaggagaaggaggttaagtaatggagacttatgaatttaacattacagataaagaacaaacaggtatgcgtgtagataagttgctgcctgaattaaataatgattggtctcgtaaccagatacaagattggattaaagcaggtttagtcgttgcaaacgataaagttgttaaatctaattataaagtgaaacttaatgatcatatagttgtcactgaaaaagaagtggttgaagctgatattctacctgaaaatttaaatttagatatttattatgaagatgacgatgttgcagttgtatataaaccgaaaggcatggtagttcatccatcaccagggcattataccaatacattagttaatggtttaatgtatcaaattaaaaatttgtcaggtattaatggagaaattcgtccaggtattgttcaccgtatagatatggatacttctggtttattaatggttgctaaaaatgatattgctcatcgtgggcttgtagaacaattaatggataaatctgttaaaagaaaatatatcgctttagttcacgggaatattcctcatgattacggtacaatcgatgcgccaattggtagaaacaaaaatgatcgtcaatctatggctgttgttgatgatggtaaggaagcagtgacacattttaacgtactagaacattttaaagattatacgcttgttgaatgtcaacttgaaacaggacgtacgcatcaaatccgtgtgcacatgaaatatattggcttcccattagttggtgatccaaagtatggaccgaaaaagacattggatattggtggtcaagctctacatgctggacttattggattcgaacatccagtaacaggtgaatatattgaaagacatgctgaattaccacaagactttgaagatttattagatacaattcgaaaaagagatgcataattgtgttgtgctataattacgataacattattatgtaaactataagtatttatcgttttcgtttttttaaaatgaaaacacattataaaatagattaaggttaacatttttactgagatcggttaatttttcaatatagattgacaaagcgcctgattagtattatccttataacagtttaagtacaacataaagagtctttaattgagcgtccagagagacgtcaaagacatgaaaatatagatatatactaaaatgatcataacactttcacatatgcaagaataagtagtaatactacgattcttctatgtaaataggctgattgtatatactaaacctcatgtcgatattaaagacatgaggttttttgtttctaaattttgaaagggtgagaatatgtctgaacgtattataatggatgatgccgcaatacaacgtacagtgacgagaatcgctcacgaaattttggagtataacaaaggtactgataatttaattcttttaggtatcaaaacaagaggtgaatatttagcgaatcgtatacaagataaaattcatcaaattgagcaacaacgtatacctactggaacaattgatattacatactttagagatgatatagagcacatgtcatcacttacgacaaaagacgcaatagacatcgacacagatattacagataaagtagtcatcattattgatgatgtgctgtatactggtcgaacggttcgtgcttcacttgatgctattttgctaaatgctagacctattaaaattggtttagctgctttggttgatcgaggacatcgtgagttaccaattcgagcagattttgttggtaaaaatatacctacttctaaagaggaaacggtaagtgtctatttagaagaaatggatcaaagaaatgcagttataattaaataataccccttttaattcagtacgagagactgaaaaaggtgggggagttgaatgataaataagttttcatatgcttgtttatctaataataccctcatgttcgacaactataagtcaatttctatggacgaaaatgacttgtagcaacttgtcacactttttgtctctttacatatactgatgtaaagagatttttttattatcggaggaaatgaatattatgcaaaatgatgaaatgtttgaacgaacagtaaaaccagtactagatgtaaatgaaaaaccacaaccagcgcaatgggcatttttaagcttacaacatttatttgcgatgtttggcgcaacagtactagtaccattcttaacaggactaccaatatccgcagcgttactagcttcgggaatcggtacattactttatatcttaataacgaaggcgcaaataccagcatacttgggatctagctttgcatttatcacaccaattatcacgggattaagtacgcatagcttaggagacatgcttgtagcattattcatgagtggtgttatgtacgtcatcatcggaattctaatcaaattaagtgggacagcatggttaatgaaattattaccaccagttgttgttggaccagtcatcatggtaattggtttaagcttagcgcctactgcagtcaatatggcaatgtatgaaaatcctggagatatgaaaggttacaatatcagtttcttaattgttgcaatgataaccttgcttgtaacaatagtcgttcaaggattttttaaaggattcctatctttaattccagtacttgtaggtattatcgtaggttatgtggtagcgatttttatggggattgtgaaatttgatgcaattatgtcagcaaaatggatagatttccctcatatttatctgccatttaaagattatgtaccttcatttcacttaggacttgtacttgtaatgattccgattgtgtttgtaacagtaagtgaacatattgggcaccaaatggtattgaataaaatcgtaggtagaaacttctttgaaaagccaggacttgataaatcaatcattggtgatggtgtttctacaatgtttgccagtattattggtggaccaccaagtacaacatacggtgaaaatatcggtgtattagcgattacaagaatatacagtatttacgtcattggtggtgcagcagttatagcaattgttttagcattcattggtaagttcactgcattaatttcttctatacctacaccagttatgggaggagtatctatattacttttcggtattattgcagcaagtggcttaagaatgttagttgaaagcaaagtagattttgcgaacaatcgaaatttagttatagcttctgtaattttagttgtaggtatcggtaatttagtatttaacttaaaagaaattggtatcaaccttcaaattgaggggatggcattagctgcactttcaggaattattttgaacttaatcttacctaaagagaaaaaacaaaacaattaagatttacaaattaaggagggcgcttttatgaatcatttattatcaatggaacatttatctacagatcaaatatacaaacttatccaaaaggcaagtcaatttaaatctggtgaacgtcaactaccaaactttgaagggaaatatgtcgcaaatttattctttgaaaattctactcgaacaaaatgtagttttgaaatggcagaacttaagctagggttaaaaacgattagctttgaaacatcaacatcatctgtttcaaaaggtgaatctttatatgacacatgtaaaactttagaaagtattggctgtgatttattagtcattagacatccgtttaataactactatgaaaaattagcgaatattaacatcccaattgcgaatgctggtgatggtagtggacaacatccaacacaaagtttacttgatttaatgacgatatatgaagaatatggatattttgaaggcttgaatgtattgatttgtggagacattaaaaattcacgtgtcgcacgtagtaattaccatagtttaaaagcattaggtgcaaacgtaatgtttaatagcccaaatgcttggattgatgattctttagaagcaccttatgtaaatatagatgatgttatagaaacagtagatatagttatgttattaagaattcaacatgaaagacatgggcttgcagaagaaactagatttgcagcagatgattatcatcaaaagcatggcttaaatgaagtgcgctataacaaattacaagaacatgctattgttatgcatccggcacctgtgaatagaggagtagaaatacaaagcgatttagtagaagcttcaaaatcaagaatttttaagcaaatggaaaatggcgtttacttaagaatggcagtcattgatgaattattaaaataggtaaggggacgaaaatgatgaaattaattaaaaacggtaaagtattacaaaatggagaattacaacaagcagatattttaattgatggtaaggtaattaaacaaattgcacctgcaattgaaccaagcaatggtgttgacatcatagatgcgaaaggtcactttgtgtcacctggatttgtcgatgttcatgttcatttacgtgaacctggtggtgaatataaagagacaattgaaactggtactaaagctgctgctagaggcggatttacaactgtatgtccaatgcctaacacaagaccggtaccagattctgtagaacattttgaagctttacaaaaattaatcgatgacaatgctcaagtacgtgtattaccttatgcttcaattacaacacgtcaattaggtaaagaattggttgatttcccagcactagtaaaagaaggtgcctttgcgtttacagatgacggtgtaggagtacaaactgcaagcatgatgtatgaaggcatgattgaagctgcaaaagtaaacaaagccatcgtagcacactgtgaagataattcattaatctatggtggtgcaatgcatgaagggaaacgcagtaaagagttaggtataccaggtattccaaacatttgtgaatctgttcaaatcgcaagagatgtactattagctgaagcagcaggttgtcattatcatgtatgtcatgtttctactaaagaaagtgttagagtcattcgtgacgctaaacgcgcaggcattcatgttacagctgaagttacaccacaccatttattgttaacagaagatgatattcctggtaataatgccatttataaaatgaatccaccattgagaagtactgaagatagagaggctttgttagaagggttactagacggtacaattgactgtatcgcaacagaccatgcaccacatgcacgtgatgaaaaagcacaaccaatggaaaaagcaccattcggaattgttggtagtgaaacagcattcccattattatatacgcattttgtaaaaaatggtgattggacattacaacaattagtagattacttaacaattaaaccatgtgagacatttaatttagaatacggcacattaaaagaaaatggttatgcagatttaacaatcattgatttagatagtgaacaagaaattaaaggagaagatttcttatcaaaagcagataatacaccatttatcggctataaagtttatggaaatccgatcttaacaatggttgaaggcgaagttaaatttgagggggataaataatatgcaaagcaaacgttatctagtgttagaagacggttctttttacgaaggctaccgtttaggatctgataacttaactgtaggagaaattgtatttaatacagctatgacaggttatcaagaaactatttcagatccatcatatacaggtcagatcattacttttacgtatccattaatcggtaattatggtatcaatagagacgattttgaatcattagtacctacattaaacggtattgtagtgaaagaagcgagtgcgcatccaagtaattttagacaacaaaagacacttcatgacgttttagaattgcatcaaattccagggattgcaggtgttgatacaagaagtattacgcgtaaaattcgacaacacggtgtgttaaaagctggttttactgatcgaaaagaagatattgatcaacttgtcaaacatttacaacaagtagaattacctaaaaacgaagtagaaatcgtttcgactaaaacaccgtatgtttcgacaggtaaggatctaagtgtcgtacttgtagactttggtaagaagcaaaatattgttcgagaattaaacgtcagaggttgtaacgtcacagttgtaccatatacaactactgccgaagaaattttagcaatggctccagatggcgttatgctatcaaacggaccaggtaatcctgaagttgtagaatgtgcgattccaatgattcaaggaattttagggaaaattccgttctttggtatctgtctaggacatcaactttttgcattatctcaaggagcaagctcatttaaaatgaagtttggtcatcgtggtgcgaaccatccagttaaaaatttagagactggaaaagttgatattacgagtcaaaaccatggatatgcaatagatatagattcgttaaaaagtactgatttagaagttactcatcttgcattaaatgatggtactgtagaaggtttaaaacataaaacattaccagcattttctgttcaataccatcctgaagcaaatccaggaccgtcagattcaaactatctatttgatgattttgtagcaatgatgactaattttaaggaaaaggagcgtcatatcaatgcctaaacgtaatgatatcaaaacaattttagtaatagggtctgggccaattatcataggtcaagcagctgaatttgattatgctggaacacaagcatgtctagctttaaaagaagagggatatcgagttattcttgtaaattcaaatccagcgacaatcatgactgataaggaaattgcggataaagtatatatcgaaccgttaactcatgattttatagcgcgaattatacgtaaagagcaacctgacgctttacttccaactttaggtggtcaaacaggtttaaacatggcgattcaactacacgaaagtggtgtgcttcaagataataacgtccaattattaggaactgagctaacatcaattcaacaagcagaagaccgtgaaatgtttagaacattaatgaatgatttaaacgttcctgtaccagagagtgacattgtaaatacagtagagcaagcctttaaattcaaagagcaagtgggatacccgctaattgttagaccggcatttacgatgggtggtaccggaggcggtatttgtcataatgatgaagaattacatgaaatcgtctcaaatggtcttcattatagtccagcaacgcaatgtttattagaaaaatctatcgcaggttttaaagaaatcgaatacgaagtaatgcgtgataaaaacgataatgccatcgttgtatgtaacatggaaaatattgatccagttggtattcatactggcgattcaattgttgtggctcctagtcaaacattatcagatgttgagtatcaaatgttacgtgatgtttcattaaaagttattcgagctttaggtatcgaaggtggttgtaatgttcaattagcattagatccccattcattcgattattatattatagaagtaaatccgcgtgtatcacgttcatcagcgttagcttcaaaagcaacaggatatcctattgcaaaattagctgctaaaatcgcggttggtctaacattagatgaaatgttaaatccaattacaggaacatcttatgcagcgtttgaaccaactttagactatgtgatttcaaaaataccaagatttccttttgataaatttgaaaaaggagaacgagagcttggcacacaaatgaaagcaacaggtgaagttatggccattggtcgaacttacgaagaatcattgttaaaagcaattcgatcacttgagtatggtgtgcatcacttaggattaccaaatggtgaaagcttcgatcttgattatattaaagaacgtatttcacaccaagatgatgaacgattatttttcatcggcgaagcaattagaagagggacaacattagaagaaattcataatatgactcagattgattacttcttcttacacaagttccaaaacattattgatattgagcatcaattaaaagagcatcaaggtgatttagaatatcttaaatatgcaaaagattatggatttagtgataaaacaatagcgcatcgctttaatatgacggaagaagaagtatatcaattgcgtatggaaaatgatattaaacctgtttacaagatggttgatacttgcgcagctgaatttgaatcttcaacaccatattattatggtacatacgaaactgaaaatgaatccatagttactgacaaagaaaaaatcttagtattaggctctggaccaattcgaatcggccaaggtgtagaatttgactatgcgacagttcacgccgtttgggcaattcaaaaagcagggtacgaagcgataattgtgaataacaatccagaaacagtttcaacagacttctcaatttctgacaaattatactttgaacctttaactgaagaagatgtgatgaatatcattaatttagaaaaacctaaaggtgtcgttgtacaatttggaggacaaacagcgattaatttagcagacaaattggctaaacatggtgttaaaatacttggtacttcactagaaaatctaaatcgtgctgaagatagaaaagaatttgaagcactattaagaaaaattaacgtgccacagccacaagggaaatcagctacatcacctgaggaagcattagcgaatgctgcagaaatcggatatccggttgtagtaagaccttcttatgtattaggtggtcgcgcaatggaaattgtagacaatgacaaagagttagaaaactatatgacccaggctgtaaaagcgagtccggaacatccggtactagtcgatagatatttaactggtaaagaaattgaagttgatgcgatttgtgatggagaaacggtcattattccaggaatcatggaacatattgaacgtgctggtgtacatagtggtgactcaatcgctgtatatccgccacaaactttgacagaagacgagttagcaacacttgaggactatactataaaattagctaaaggtttaaacatcattggcttaatcaacattcaattcgttatagctcacgatggtgtatatgttttagaagtaaacccacgttctagtagaacggtaccattcttaagtaaaattactgatattccaatggcacaattagctatgcgagcaatcattggggaaaaactaacagatatgggttatcaagaaggggttcaaccatatgctgagggtgtatttgtgaaagcaccggtatttagttttaataaattgaaaaatgttgatattactttaggacctgaaatgaagtctacaggtgaagtaatggggaaagatactacattagaaaaggcgttattcaaagggttaacaggtagtggtgttgaagttaaagatcacggtacagtattaatgaccgtcagtgacaaagataaagaggaagttgttaaattggcacaacgcttaaatgaagttggctataaaattttagcaacgtctggaacagctaataaattagctgagtatgacatacctgcagaagtagtaggcaaaatcggtggcgaaaatgatttattaacacgtattcaaaatggtgatgttcaaatcgttataaatacaatgactaaaggtaaagaagtagaaagggatggcttccaaattagacgtactacagttgaaaatggtattccatgtttgacatctttagatacagctaatgccttaacgaatgtaattgaaagtatgacatttacaatgcgtcaaatgtaaatcaatcaaactgtatcggtggggctgtaattaaccatttacttaaagaagtttatattacagcctcattattttaatgaatttcttaatataaagggagacatatatgatgaaagatttaccaattattgcattagattttgaatcaaaagaaaaagtaaatcaatttttagatttatttgatgaatcattattcgtaaaagtaggtatggaacttttttatcaagaaggtcctcaattaattaatgagataaaagaaagaggccatgatgtatttttagatttaaaactgcatgatattcctaatacagttggtaaggcgatggaaggactagctaaattgaatgttgatctggtaaatgttcatgctgctggtggcgtaaaaatgatgtctgaggccattaaaggattaagaaaacataatcaacatacaaaaattattgcagtaacacagcttacgtcaacaacagaagacatgttacgacacgaacaaaatatacaaacatcgattgaagaggccgttttaaattatgccaagttagcaaatgcagctggtttagatggcgttgtttgttcacctcttgaaagtcgtatgttgactgaaaagttaggtacatcatttttaaaagtaacaccaggtattagacctaaaggtgcatctcaagatgaccaacaccgtattacgacaccggaagaagcaagacagcttggttcgacgcatattgtagtcggtagaccgattacacaaagtgacaatccagtcgaaagttatcataaaattaaagaaagttggttagtataatggctaaagaaattgcaaaatcattattagatattgaagctgtaacattatcaccaaatgatttatatacatggagttcaggtattaaatcaccgatttactgtgataaccgtgttacgttaggttatcctttagttcgaggcgcaatccgcgatggtttaattaacttaattaaagaacactttcctgaagtagaagttatttctggtactgcaacagctggtattccacatgcagcttttattgctgaaaaattaaaattaccaatgaattatgttcgttcatcaaataagagtcatggtaagcaaaatcaaatcgaaggtgctaaaagtgaaggtaaaaaagtagttgtgatagaagatttaatttcgacagggggatcttcagtcacagcagttgaagccttaaaacaagcaggtgcagaagtattaggtgttgtagctatctttacttacggtttgaaaaaagcagatgatacatttagcaatattcaactacctttttacactttaagtgattacaatgaattaattgaagtagctgaaaatgaaggtaaaatttctagtgaagatatccaaacattagttgaatggagagacaacttagcataatatagacactagaaggaggaattcaacaaatgaatgacaaaacatctaatgatttatatgggaagataaaacattgtaacgaatttatcaatcattcaaatgattccaatctatctagtagtcacgatgtcgacgaaagttcaacgaagcaaaaacatataaaaaataaaacaactatagatcataatgatgatttatttaaacatgtaaaggatatattacgtaaacaaggacaaatttaaaaacaaaaaagctatagtgtttaatatcaggggctgcttaaccgcatccgaatattacaaacactatagcttttattatataaaaaatttattagcggataattaactttattaaaatccaaccaattaagaatacgagtaataggactaatactggaatcacataatgtaacataacgtccctcctttaacttaattttaattgtaatcaaatttgacaataagtcaaaacattaatacctatgataagtatcatttattaacatatgtatcatatttttaatcttgcgtaatttttatcgttaactatgtgatttaatcaacaggccaataagacgtttgtcattcgtgcacataacggtatgacgcgcttttgtcattttaattatgttaagataatagtagttatagaagttcgatctataggaggcatagcatggatattccaaaaatcacgacatttttaatgtttaataacaaagctgaagaagctgttaaactatacacaagcttatttgaagatagtgagattataacaatggctaagtatggtgaaaatggacctggtgatcacgggactgtacaacactcaatatttacattaaatggacaagtattcatggcgattgatgctaatagtggcacagaattaccaatgaatcctgcgatttcattatttgttacagtaaaagatactattgaaatggaacgactatttaatggattaaaagatgaaggtgccattttaatgccaaaaacgaatatgccaccatacagagagtttgcttgggttcaagataagtttggagtaagttttcaattagcattacctgagtaaaaggattcgcacagcgttgaatgataaagaaacactttttcttatgcatgcgttttacctatgtatttctattttaagtacacattagcattttagtttcactcatttttaaaatcacaaagataatttgtaacttaaatgatgatacgttatttaaaaacacgatacttcgtttcaatgaacgcattaaataataaataaacacctcgcaaaagaaagtagtcctttcttatggtgaggtgtttatttgtcgacaacttgattataattgtttcattttttgaataagttcataatcaggtgtagcatacaaagttttttgattgtcatatgttacaaacccaggctttgcacctgatggtttgtgcacatttttaattaatgtgtaatcaacaggtatttgtccagaattaccagcttttgaaaagtatcctgctaacatagccgcttccttgattgtcgtatcacttggtgcatcattaaatataacgacatgtgaaccaggaatatcttttgtgtgtaaccatgtgtgagtttttttagcttttttatttgttaaataatcattttgcttgttattcttgccaacatatatatcgtcgccatcagttgatacataatgttgtaattgaatctgcgctttctttttcttagtttgatttttacgctgtttcataaagccttgttctgctaattcatctctaatttcatcaatgtcatggacagaaatatgatgtaattgttgttcgattgttgaaaaataatctatattatctttcgtcaattgaatttgatgttgtaattcacgttctctcgttttcatacgattatattgtttataataatattgagcatttgctgatggggattttgtaggatttaaaggaatgacaacttcttcattcgtataataattcaatgctgtcacttctttatcgccttgcttaattcgatatatattagcagtgatcaattcaccatataactgttcggtatctttatttttagactgctcatattcttcaatcaacttcgctaatttattttgatatttgtgcaactgctgttgaacaaatcgaactaaatcattcgcacgttgtttaacgcgttcacgttcgccacgcgcgtcataaaaacgatcaagtaaatcatttaatgaatcgtacgtaactgtatcatcattaaattgatttaactttataaaatagaaatcctctttacctgtttcatgatttttatgaaaaataggagtaggtggtaacttggtttctgccattacttcgtcgaatgcttctggtaatgttgatgaagtcataaattgacgacgactaacgatttcattcgtaattaaagggctaaatccttcaaactgattcaataattgtttagcaatattacctgcgttaaaatcgatatatttcaacacctctgcacctgtaatatcatacggatttattttgtgctgagtaggtggtgcttcataattaaatcctggcattactgtacgatagtgattcgtatttggtgttaagtgtttaaatccttcaattattttgcgattttcatctactaaaattaagttactatgtttacccataatctcaaggatgacagtgcggtaaatagtatcgccaatttcatctttactctttatatcgatttcaatgcgacgatcattaccaatttgcttaatcgattcgataataccaccttctaagtgttttctaaaaacacgcgcaaacatgggtggattaaatggattatcatattttttagtagtcaattgtaatcttgaaaagtttggatggattgacaataacaattgatggttttgtctattttgacgtacaaccattagtatcgtgtcattatcaggttgattgattttgtgaacgcgtcctgttgttaaaaattgtagagactcaaccattttctttgtaaataatccatcataagccataatttatcttccaccttcttcatatcattcgtttcattttaacatgattgtaacttttcggtatagttattgaaccatacattatgccacacattttacattatctaaaagttcgcaattcaatttatttaattaaaattaatcgtgcaatataacgatattgttagacttaatagaaattatggcatgcaatttcaaatatgctatacaatataaagaacaatgtgatatcatatttaaataatagaagattagcttagagaggtcgtaaggcatggataatgaaaaaggattgttaatcgttttatcaggaccatctggagtaggtaaaggtactgttagaaaacgaatatttgaagatccaagtacatcatataagtattctatttcaatgacaacacgtcaaatgcgtgaaggtgaagttgatggcgtagattacttttttaaaactagggatgcgtttgaagctttaattaaagatgaccaatttatagaatatgctgaatatgtaggcaactattatggtacaccagttcaatatgttaaagatacaatggacgaaggtcatgatgtatttttagaaattgaagtagaaggtgcaaagcaagttagaaagaaatttccagatgcgttatttattttcttagcacctccaagtttagatcacttgagagagcgattagtaggtagaggaacagaatccaatgagaaaatacaaagtcgtattaacgaagcgcgtaaagaagttgaaatgatgaatttatacgattacgttgtagttaatgatgaagtagaacttgcgaagaatagaattcaatgtattgtagaagctgagcacttaaaaagagagcgcgtagaagctaagtatagaaaaatgattttggaggctaaaaaataatgttaaatccacctttaaaccaattaacgtcacaaattaaatcaaagtatttaattgcaacaactgcagcgaaaagagcgcgtgaaattgatgaacaacctgaaactgaattattaagtgaatatcattcatttaaaccagttggtagagcgttagaagaaattgctgacggtaaaattcgccctgttatttcaagtgattattatggtaaagaatagtttcgaccattaaaaatatgtgaagctagacgtacatcaaatacgtcaaggcatatccaaatcaaacgcacctatgtaggtgtgtttttttagtttatccaatgattgatgttataataatactaaatttgtatctataaaaaagtaatgagcatttgtgcgcatatgatgatgtaaagcgtaaatgtcatagtgatatttaagggagattgaatatgaagaaaatattattagccgttacaggtggcattgcggcatataaagcaattgatttgacaagtaagttaacacaatctgggtatgaagttcgcgttatgttaacgaatcacgcacaaaaatttgtgacaccattagcatttcaagcaataagtcgaaatgctgtttatacagatacttttatagaagaaaatccttcagaaatacagcatattgcattaggtgattgggcagatgcaatcattgttgcacctgcaacggcaaatacaattgcaaaattgagtgtaggtattgctgatgatttggtgacatcaacgttgctagcaacagagacaccgaaatttattgcgcctgctatgaatgtgcatatgtatgaaaataaacgtacgcagcaaaatattaatattttaaaagaagatgggtatcattttatcgaaccaggaagcggatttctagcatgtggttatgttgctaaaggacgtatggaagaaccgcttcaaatcgtttctgttattgatgctcattttcaaaatagtaatcgtttagctaatagttcatttcaagataaacgcgcattggttacagcaggaccaactattgaagttatcgatccagtcagatttgtatccaatcgttcttctggaaaaatgggctatgcaatagctgaagcattgcgaaatcgaggagctatcgtgacgttagttgctggtcctacaacactagaggatccaaaagatattgaagttattcatgttcaaagtgctgaagaaatgtttgaacaagtgacaagccgatttgacgaacaagatattgttgtaaaagcagcagccgtatctgactatacaccggttgatgtattagaacataagatgaaaaagcaggatggtgatttgtcagtatcttttaaacgtactaaagacattcttaaatatttaggtgaacataaaacatcacagtatttaataggctttgcagcagagactgaagatattgaaaattatgcacaacaaaaattacgcaagaaaaatgcagatgtgattatttcaaataatgttggggatatgtctatcggatttagttctgatgataatgaattgacaatgcattttaaaaataatgaaaaggtaaatatcaagaaaggaaaaaaagtagtattagctgcacaaattttagatgaactagaaactaggtggcaataatgatagcgaaagtcatagtcgatgtcgcgtcgaagagcgttgactataaatttgattatataattcccgaacaactcgaatctgtcatccaacctggtgtgcgtgtaattgtaccttttggaccaagaacgattcaaggttatgtaatggaagtaacagcagaacctgatgcacaacttgacgtttcgaagttaaaaaaaatcatagaagtgaaagatatacaaccagaattaacatcagaattaatagctttaagtgagtggatgggttcaactcatgtcattaaacgtatttctatgctagaagtgatgcttccaagtgctattaaagcgaagtataaaaaagcatttaagatgaaagatgacatagagctaccttcagctttattacaaaaatttgataagcatggttactattattataaagatgcgcaaaaaaataatgatattcaattgcttatgaagttgttaaaagatgatatcgttgaagaaaaaacgattctcacacaaaatataactaaaaaaaccaagcgtgctgttcgtgtcattgaagggtatcatcctgatgaagtattagctaagttggagaaagttattaaacaatacgatttgtatgcttacttgtctgaagaacaacataaaacaatatttttaactgatattgaggatatgggcttttcaaaatccagtttagatggacttatcaaaaaaggttatgttgaaaaatatgacgcggttgttgaaagagacccatttaaagatcgtgttttcgaacaagaatcaaaacagcaattaacagaagaccaatataaagcatatgaagcgattaaagctaaaattgtaagccaagagcaagaaacatttttacttcatggtgtgacgggatcaggtaaaacagaagtatatttacaaacgatagaagatgttttaagccaaggaaaacaggcgatgatgttagttcctgaaatcgctctaacaccgcaaatggttttacgcttcaaacgtcgatttggtgatgacgttgctgtattacattctggcttatctaatggggaacgttatgatgagtggcaaaaaattagggatgatcgtgcgagagtaagtgttggtgcaaggtcaagtgtgttcgcacctttcaaaaatttagggttaatcatcattgatgaagaacatgaatctacatataaacaagaagattatccgagatatcacgctagagaaattgcccaatggcgaagtgaatatcatcactgtccagtcattttaggaagtgcaacaccatgtcttgaaagttatgcacgagctgaaaaagacgtttatcatttgctatcattaccaaacagagtgaaccaacaagctttacctgaaattgatatagtagacatgcgtgaagaattgagtgaaggtaatcggtcaatgttttcaaaagatttacgtgaagccatacaattaagattagatcgacaggaacaagttgttttatttttaaatcgacgtggttatgcatcgtttatgttatgtcgggattgtggatatgtaccgcaatgtccaaactgtgatatttcattaacgtatcataaaacgacagacttattaaaatgtcactattgtggttaccaagagacgccaccgaatcaatgtccaaattgtgagagtgaacacattcgacaagtaggtactggtactcagaaagttgaagaactattgcaacaagaatttgaagatgcgcgcataattaggatggatgtagatacaacctcaaagaaaggtgcacatgaaaagttattgactgaattcgaaaaaggtaacggtgacattttactaggtactcagatgattgcgaaaggattagattatccaaatattactttagttggtgtgctgaatgcagatacaatgttaaatttacctgattttcgggcgagcgaacgtacttatcaactattaacgcaagtggctggtagagctggtcgtcatgaaaaggcaggtcaagtcatcattcaaacgtataatccagatcattattcaatattggatgttcaaaaaaatgattatttaacattttatcgtcaggaaatggaatatcgtaaattaggaaagtatccaccgtattattatttgattaatttcacaatctcacataaagaaatgaagaaggttatggaagcatcgcagcatgttcataaaattttattacagcatttaacagaaaaagcgcttgtactaggtccatctccggcagcacttgcgagaatcaacaatgaatttagattccaaattttagtgaaatataaaagtgaacctggattattacaagccattcagtttttagatgactattaccatgaaaaatttataaaagaaaaattagcattgaagattgatattgatccacagatgatgatgtaacattactaattattagaaacaagttcagtatgtacgagtatttgaaccagtgtttgaatatttactttaagtacagaaaaagggcagaatatacaactgttaactatttaaattagcagtttatattctgtctttttatatggctttataacttacgtgattttggtttgataaggaatttattagtattttcatttacgaattctgattttaatgcaagcgccatacttactgatgaataaaagtactaatgattaaacaaactatttttaaatggcaaattgaaatagtgcaaattttacacttataaattaatggctataaactattttatatctatctatgttttaactacttaaattattagacaaaacaattttcttaaattatcaattaaagtatttaaaaatattgatggttaatgtaaaatatcaatataaataagttttttaaatttatgtatgtttatttgattcaaacaaaataacttaagaggagaaagtttatgaaaaagacactgggatgtttacttttaattatgcttttagtcgtagcaggttgttcttttggtgggaatcataaattatcatcaaagaaatcagaagaatcaaaacaagaaactgtaaaaaaagaatcggaagaagagaaagatccagatttagagaaatatgaagaaatagagaagaaaatgaaaggaattaaagatgcgccatctcttgataagttggatccattaatgacagaaaagtcgtttacgaatagtaaagggattcaaggatggaaagattacaaagaattaatgggtaaagtggaacttgcagattatagatttactaaagattcaaaaggatcttcaataaaagatgttgatgcattctttaaaggtaagaaaggtataaaaaggaaagtgattgaaacacacgatgatgtaaaacaagttgattattggtatgtagatccagatggaaagaaaattggcaattcaaacacacctgttttttacgcagaaattatgacaaaatataaagatggaaagttagtttatgcatcagtcgaaccaggatcttacgtaatacataaagatgatgcaattaaatatgacgattattctaagttaaaaaaattaagtcagctaactaaacttgatcatccaaaaccagttccatatagcgtagctcaaatcaaatctttcggagtacctttaacaagcgtttcatttatgacacatggatcaaaggatactaaagatgaagtgttgccggcattggcctatttcactttttcaccaaaaaattatgaagacaagtctaatccagatccaaaagttttaaatttagtacatatggatttcttaaatgcatctagtgattttggtaacgcacattttgttgttttaagtaaatatattaaagagtatgaatcaaactatgaaacagcgtcagatgattctttaaaatagtatttactgtgtgaaaaataaatagtgtactacattaaataatcgcaataataatcccgataaacaatcagcattactgcttatcatatagagttcgtaataactataactctatgattcgcaaataataaatgattgtcatcgggatttatttttatcaatttataaagtgacattaccttgttcatcagcaggtttgaaaacagtaatcactgcactaataattgctaaaatgtgtgggatacctgtccaacagaatattaagtgtagaataccttgcatattcttgccggcataaaatttatgaataccaaaactacctaagaacaatgctaataaaatataaataactttgtttacttgcatttctttccctccagttgaattgcttataatgtcattagcttctctttttattatacccacttttagttcaaacattctagtttaagcattcccaatcatctaaatttcagttattcattccttacaataaatttaggattacacttcagttgcattgtattattttacgtgtgaaatatacgtaatgaatcacatgacaatcttcaaattgaaaaatatacattctatgatgtaaggtcgcatttttaatatatttacgttataatagtttgatgaattttattgaggagtaagagttatggcgattaaaaagttagtaccagcatcgcatcctattttaacgaaaaaagcgcaagcagttaaaacatttgatgattcgttaaaaagattattacaagatttagaagatacaatgtatgcacaagaagctgctggcttatgtgcacctcaaattaatcagtcattgcaagtggcaattattgatatggaaatggaaggattattacaacttgttaatccgaaaattattagtcaatcaaatgaaacaataacagacttagaaggttcaattacattgccagatgtttacggcgaagtgacaagaagtaaaatgatagttgttgaaagttatgacgtcaatgggaacaaagttgaactaactgcacatgaagatgtagcaagaatgattttgcatattatagatcaaatgaacggtatcccttttacagaacgtgcggaccgtattttaacagataaagaagtggaggcatattttataaatgactaaaataatatttatgggtacaccagacttttcaacaactgttttagaaatgcttattgcagaacatgatgtcattgcagtcgtaacgcaaccagatcgacctgttggacgtaaacgtgttatgacaccaccaccagttaaaaaagttgcaatgaaatatgatttacctgtatatcagcctgaaaaattaagtggatcagaagaattagaacaattgcttcaattagatgtagatttaattgtaactgctgcttttggacaattattacctgaatcattgttggcattaccaaaacttggcgcaattaatgtacatgcatcattgttaccaaagtatagaggtggtgcaccaattcatcaggcaattatcgatggtgaacaagaaaccggcataacaattatgtatatggttaaaaaattagatgcgggtaatattatttcgcaacaagcaattaaaatagaagaaaatgataatgtcggtacgatgcatgataaattaagtgtattaggggcagatttattaaaagaaactttaccatctattatagagggcacaaatgaaagtgtacctcaagatgatacgcaagcaacatttgcttccaatattcgacgcgaagatgagcgaattagctggaataaaccaggaagacaagtgtttaatcaaattcgtggattatcaccatggccagttgcttatacaactatggatgacactaacttgaaaatatacgatgctgaactcgttgagactaataagataaacgagcctggaaccattatagaaacgactaaaaaagccattattgttgctacaaatgataatgaagctgttgcaattaaagatatgcaattagctgggaaaaagagaatgttagctgccaattatttaagtggtgcgcaaaacacactagtagggaagaaacttatatgatcgaaaacgtgagaagtcttgcttttgacacgattcaagatatattaaatgaaggtgcgtatagtaacttgcgtatcaatgaagtgttgtcagaaaatgaattaaatgcaatggataaggctttatttacagaaattgtctacggaaccgttaaaagaaaatatacgttagatttttatttaaagccttttgtgaaaacaaagattaaggcatgggttaggcaattattatggatgagtatttatcaatatgtatatttagataaagttccaaatcatgccattattaatgaagcagttgaaatagcaaaagaacgcggtggctatcataatggtaatgtcgtaaatggtattttacgtacaatgatgcgtagtgacttacctgattttaatgaaattgcagatcctaaaaaaagaatggcaatcgagtatagtatgccgaagtggattatagatcattgggcaacacattatggtctcgaagaaactgaaacaattttacagtcatttttagaaacgacatcaacaactgtgcgtgccaacctgacgcgagcatcattagatgatattattgaaaagttgcaagacgaaggttatgacgttgaaaaagatcatgacttaccttattgtctccatataggaggacaaccaattattcattctcgttcatttaaagatggattcgtttcaattcaagataaaagctcaatgtttgttgcacacattatgaatgtagaccgacatgatcacgtattagatgcatgtagtgcacctggcggtaaagcttgtcacattgctgaagttttaatgccagaagggcaagttgacgcttcagatatacatgatcacaaaatagacttaattaattttaatataaaaaaattacgattaacaaatattaaggcttttcaacatgatgcgacaaaaccttatgataaaacatacgataagatacttgttgatgcaccatgtagcggattaggtgtaatgagacataagccggagattaagtatactcaaagcaaacaacatattgagtcactagttgaattacagcttgaaatattggaaaatgtaaaaaacaatgtaaaaataggtggcgaaatcatctattcaacatgtacaattgagcaactagaaaatgaaaacgtgatttatacgtttctgaaaaataataaaaacttcgaatttgaaccgtttcaacatccgataactggagagttggtcaaaacgttacaaatcatgccgcaagactttaattcagatggattctttatcactaagataaaaagaaaggacaattaggaatgataactgctgaaaagaaaaagaagaataaatttcttccaaattttgacaagcaatcaatatattcattgcgatttgacgaaatgcaaaactggctcgttgaacaaggtcaacaaaaatttcgagcgaaacagatttttgaatggttatatcaaaaaagagtagattcgattgatgaaatgacgaacttatcgaaagacttacgacagcttttaaaagataactttactgttacaactttaacaactgtagtaaaacaagaaagtaaagacggtacaattaaattcttatttgaattacaagatggctatacaattgaaactgttttaatgagacatgattatggaaattcagtatgtgtaacgacacaagtaggttgtcgtatcggatgtacgttttgtgcttctacacttggcggcttaaaaagaaaccttgaagctggcgaaattgtttcacaagttttaacagttcaaaaagcccttgatgctacagaagagcgcgtatctcaaattgtcataatgggtatcggtgaaccatttgaaaattatgatgaaatgatggactttttaagaatcgtcaatgatgataacagtttaaatattggtgcacgtcacattacagtatcaacatcaggtatcattcctagaatatatgactttgcggatgaagatatccaaattaattttgctgtaagcttacacgccgcaaaagatgaagtgcgatcacgcttgatgccaattaaccgtgcatataatgttgagaagttaatcgaagcaattcaatattatcaagaaaaaacaaatcgtcgtgttacttttgaatatggtctgtttggtggtgtgaatgaccaactagaacatgcaagagaattagcacatttaataaaaggcttaaactgccatgttaacttaattcctgtcaaccatgttccagaaagaaattatgtgaaaacggctaaaaatgatatctttaaatttgaaaaagaattaaagagactaggaattaatgccacaatacgtcgtgaacaaggttcggatattgacgcagcttgtggtcaattaagagcaaaggaacgacaagtagaaacgaggtaaagacaaatgctagaggcacaattttttactgatactggacaacatagagataagaatgaagatgcgggtggtattttttataatcaaactaatcaacaacttttagttctgtgtgatggtatgggcggccataaagcaggagaagttgcaagtaaatttgttacagatgagttgaaatcccgttttgaagcggaaaatcttatagaagaacatcaagctgaaaattggttgcgtaataatataaaagatataaattttcagttatatcactatgcacaagaaaatgcagaatataaaggtatgggtacaacatgtgtttgtgcacttgtttttgaaaaatcagttgtgatagcaaatgtcggtgattctagagcctatgttattaatagtagacaaattgaacaaattactagtgatcactcatttgttaatcatcttgttttaacgggtcaaattacgccggaagaagcatttacacatccacaacgtaatattattacgaaggtgatgggcacagataaacgtgtgagtccagatttgtttattaagcgattaaatttttatgattatttattattaaattcagatggattaactgattatgttaaagacaatgaaattaagcgtttgttagtaaaagaaggtacaatagaagatcatggtgatcaattaatgcaattggcattagataaccattcgaaagataacgttactttcatactcgcggctattgaaggtgataaagtatgataggtaaaataataaatgaacgatataaaattgtagataagcttggcggcggtggcatgagtaccgtttatcttgcagaagatacgatacttaacattaaagttgcaattaaggcgatttttataccacctagagaaaaagaagaaacattaaaacgttttgaacgagaagtacataactcatcacagctatcacatcaaaatatagtaagtatgatcgatgttgatgaagaagatgactgttactacttagtaatggaatatattgaaggtccgactttgtctgagtatattgaaagtcatgggccattaagtgttgacacggcgattaattttacgaatcaaatattggatggcattaaacatgcgcatgatatgcgtattgtacatagagatattaagccacaaaatatattaattgacagcaataaaacgttgaaaatatttgattttggaattgctaaagctttaagtgagacgtctttaactcagactaatcatgtgttaggtactgtgcagtacttttcgccagaacaagcaaaaggtgaggcaacggatgaatgtacagatatttattctataggtattgtgttatatgaaatgcttgttggtgaaccaccctttaatggagaaactgcagttagcattgcgattaaacatattcaggattctgtgccaaatgtgacaacagatgtacgtaaggatattccgcaatctttaagtaatgtcattttacgcgctacagaaaaagacaaagcgaatcgttacaaaacaattcaagaaatgaaagatgatttgagtagtgttttacatgaaaatcgagcgaatgaagatgtctatgaactcgataaaatgaaaacgatagcggtacctttgaaaaaagaagatctagcaaagcatattagtgaacataagtcgaatcaacctaaacgtgaaacgacgcaagtacctattgtaaatgggcctgctcatcatcagcaattccaaaagccagaaggtacggtgtacgaaccaaaacctaaaaagaaatcaacacgaaagattgtgctcttatcactaatcttttcgttgttaatgattgcacttgtttcttttgtggcaatggcaatgtttggtaataaatacgaagagacacctgatgtaatcgggaaatctgtaaaagaagcagagcaaatattcaataaaaacaacctgaaattgggtaaaatttctagaagttatagtgataaatatcctgaaaatgaaattattaagacaactcctaatactggtgaacgtgttgaacgtggtgacagtgttgatgttgttatatcaaagggccctgaaaaggttaaaatgccaaatgtcattggtttacctaaggaggaagcattgcagaaattaaaatcgttaggtcttaaagatgttacgattgaaaaagtatataataatcaagcgccaaaaggatacattgcaaatcaaagtgtaaccgcaaatactgaaatcgctattcatgattctaatattaaactatatgaatctttaggcattaagcaagtttatgtagaagactttgagcataaatcctttagcaaagctaaaaaagccttagaagaaaaagggtttaaagttgaaagtaaggaagagtatagtgacgatattgatgagggtgatgtgatttctcaatctcctaaaggaaaatcagtagatgaggggtcaacgatttcatttgttgtttctaaaggtaaaaaaagtgactcatcagatgtcaaaacgacaactgaatcggtagatgtaccatacactggtaaaaatgataagtcacaaaaagttaaagtttatattaaagataaagataatgacggttcaactgaaaaaggtagtttcgacattactagtgatcaacgtatagacattcctttaagaattgaaaaaggaaaaacagcaagttatattgttaaagttgacggtaaaactgtagctgaaaaagaagtcagctatgatgatatttaaatataattgaagtaaatgtaccgaggtttctatttggaagtctcggtatttttatgttgagattgcggtagttttaaaatgcttaatgtcatcatttacagttgagcattgtctatcaattctgtatcactctcacaatatttatatcatttgaaatgatcatttatatattaattttccagtctttgatataataaatgcagtaaaattaatcgagaggtgccattttgaagacaggtcgaatagtgaaatcaattagtggggtatatcaagtagacgttaatggcgaacgtttcaatacaaaaccacgaggattatttagaaagaaaaaattttcaccggtagttggtgatatagtggaatttgaagtacaaaacattaacgaaggctatattcatcaagtgtttgagcggaaaaatgagttgaaaagaccacctgtaagtaatatagatacactagtaattgtaatgagtgctgtcgagccaaatttttcaacgcaattattagatcgatttttagttattgcacattcgtatcagttaaatgcgagagttttggtgactaaaaaagataaaacaccaattgaaaagcagttcgaaattaatgagttgttgaaaatatatgaaaatattggctatgagactgaatttattggaaatgatgatgatcgaaaaaaaattgtagaagcttggccagctggacttatagtacttagtggtcaatcaggtgtcggtaagtccactttcttaaatcattatcgtccagaacttaatcttgagacaaatgatatatcaaaatcattaaatcgaggaaagcatactacaagacatgtcgaactattcgaacgtcaaaacggttatattgcagacacacctggattcagtgctttagattttgatcatatagataaagatgaaataaaagattattttcttgaattaaatcgatatggtgaaacatgtaagtttaggaattgtaatcatatcaaagaacctaattgtaatgttaagcatcaattagagatagggaatattgcgcaatttagatacgaccattatttacaactatttaatgaaatttcaaatagaaaggttagatattaaatgacaaaactatatccatcattattatctgttgattttttggatttacaacatgaattaaagcgacttgaagaagcaggtgtcgacggagttcattttgatgttatggatggtcaatttgtgcctaatatatctattggtttaccaatattagatgcagtaagaaaaggcacaacattacctatagacgtacatttgatgattgaaaatccagaaaagtatattgcatcatttgcagaacatggtgccgatatgatttcaattcatgtcgaatcaacgcctcatattcatcgtgctattcaaatgattaaacatttagataaaaaagctggtgtagtaattaatcctggtacaccaatatcacaaattgaacctattttagacattgttgattatgtattagtgatgacagttaacccagggtttggtggtcaatcatttattgatcaatgcgtagaaaaaatagcgggtcttaatgctattaaaatggaacgtcaattaaactttgatattgaagttgatggaggcgtaaataccgatacagcgaaagtttgtgttgaaaatggtgctacaatgctagtaacaggttcatttttctttaaacaagaagattataaaaaagtcacacaagcattgaaaggttgagtgtatatgcatataaatttattatgttctaatcgacacttgccgcaagatatttgggccaaaagtaatgaaggtaaatggggcggcgttgatagaggtgctttgattttattgaagcatcaaattatcccttttttctcagtgggagactttgattcagtcagtaaagaagaacgccaacttctaacagaacagttacaaatcaaaccagttcaagctgaaaaagctgatacggatttagctttagcggttgataaagctgttgcacttggatttgatagtattacaatttatggtgcaacaggcggacgattagatcacttttttggggcaattcagttattattgaaaaaagcatattataaacatgatgttcatatagaagttatcgatcaacaaaataaaattgaattattgcctaaaggtcaacatacagttgaaaaagataagagttatccgtacatttcatttataccgatgactgatgatgtagaactttctctagcaggttttaaatataatttagctagacaaatgcttaatataggttctactttaactatttcaaatgaaattgagtctttgcaagcgaaagtaactgtacatgatgggttgattttgcaaattagaagtacagatttaaattaagtatattcaaatttgtgaggatttttaataaagtgcatgtgttatttaataaagtgacgtttatagatagaatttataacataataatagatgaatcacgctgtaattaatgaagattatggcgtgatttattattggaaggaaaattgtaggtcctagtacattgatttatgtgccaaaatcgatattgaacccataagtccaatttgacagagaaccattattaaacgtattaaccaaattatattgatagttcgaatttcactatgaaccattatgtattgtttggtaacaaaaaaagaactaagaggttgagctcttagttcttaagtaaatgtgtcctccacataaggtcacattttttatgtgcaatatatttattaaactctagttactttaccagattttaaagcacgtgcagaaacccaaacttttttaggtttaccgtcaactaggattctaactttttgaaggttagcgttccatctacgtttagtagagtttaaagcgtgtgaacgtctgttaccagtcgaagctttacgacctgttacgaaacattgtttacccatatgagtacctcctttaataaatataaatacacataactacttatatacttaattaagatagcatagtttcatttgaaaaacaatgaataattttcacataaaagtcaaaaatactgagttttgtgatataattgtagactgtgaagttatgtagtatgatattttagagaaataagtgaatgaaacatttaaaatttttatttaatgatactacatctattaaaagaaaacgcctatagataatcgtcatgagtgtaaattcagtttactcaaaatataataggtgatttaagcgtaagtcattctgataagttgtaccattgatattttataaaaataatcaatgaaacttaaagcgtttatgactacactaagtggtaaaattttaaaagtgattagggaaaacgaataataaactttgaaatttaggagggacaaagatatgacattagagatttcaaatgattacggtaaaattgatatttcaaacgaagtgattgcttcggttgtaggtggaaaggccgttgaatgttatggtattgtaggtatggcatctagacaacaagttagagatggtattgcggaaatactaggacatgaaaattatgctaaaggcatcaaagtaactgaaaataatggcgtagtggatatagatatgtacattattgtaagttatggtgtgaaaatatctgaagttgccaataatgtacaatcaacagtgaaatatactttggaaaaatcacttaatgtatcagtaaattcaatcaatatatatgtacaaggtgtacgtgtgaataatacaggcaagaaagcttaggaggacaacttgaaatgattagcaaaattaatggtaaattatttgccgatatgattatacaaggggcacaaaatttatctaacaatgcagatttggtagattctttgaatgtgtatccagtgccagatggtgatacaggaacaaatatgaatcttactatgacttcaggtcgcgaagaagtagagaataatttgtcgaaaaatatcggcgaattaggtaaaacattctcgaaaggtttactaatgggtgcaagaggtaactctggtgtcatcttgtcacaattattcagaggattttgtaaaaatattgaaagtgaatctgaaattaattcaaaattgttagctgaaagttttcaagctggtgttgaaacggcatataaagctgttatgaaaccagttgaaggtacaatacttacagttgcaaaagatgctgcgcaagctgcaatagaaaaagcaaataatactgaagattgtatagaattaatggagtacattattgtaaaagccaatgaatcacttgaaaacacaccaaacttattagctgtacttaaagaagttggtgttgttgatagtggcggtaaaggtttgttatgcgtttacgaaggattcttaaaagcgcttaaaggtgaaaaagttgaagccaaagttgcaaagatagataaagatgaatttgtacatgatgaacatgatttccatggtgtaattaatactgaagatattatttatggctattgtactgaaatgatggttcgttttggaaagaataaaaaagcctttgatgaacaagaattcaggcaagatatgagtcaatttggtgattctttattagtcattaatgatgaagaaattgtgaaagttcacgtgcataccgaatacccaggtaaagtgtttaattatggtcaacaatatggtgaattaattaaacttaaggttgaaaatatgagagaacagcaccgtgaagtgattcgaaaagaacagcacacagctaaaccgaaaatggaaacggttgaaacagcaattattactatttctatgggtgaaggtatttcagagatattcaaatcaatgggtgccacacatatcattagtggtggacaaacgatgaatccttctacagaagatatcgttaaagtcattgaacaatcaaaatgtaaacgtgcaattattttaccgaataataaaaatattttaatggcaagtgaacaagcagcgagtattgttgatgcagaagcagttgttattccaacgaaatctattcctcaaggtataagcgcactattccaatatgatgtggacgcaacacttgaagaaaataaagcgcaaatggctgattcagtaaataacgttaaatctggttcattaacgtacgctgttcgtgatacgaaaattgatggcgttgagattaaaaaagacgcgtttatgggcttgattgaagataagattgtaagcagccaaagtgatcaattaacaacggttactgagttgttaaatgagatgttagcagaagatagtgaaatattgactgtgattattggtcaagatgcagagcaagcagttacagataacatgataaactggatcgaagagcaatatccagatgtagaagtggaagttcatgaaggtggacaaccaatttatcaatatttcttttcagtagaataaaaatttaaaataaaaaactaccaatgataaatcatcagttggtagttttttattttgctattttagtgttattgcgggttaaaagtatcattctcgagttgctaacaatgtcatgttcaacttagtcatgataaaataaataacatactaaatgatacgtaaaatcaaataaaacataggtgatttattttggctaaagtaaacttaatagaaagtccatattctcttttacaattaaaaggtataggtcctaagaaaatagaagtattgcaacaactaaatattcatacagtggaagatcttgttctttatttgccaactagatatgaagataatacagtgattgatttgaatcaagcagaagatcaatctaacgttacgatagaaggacaagtatatacagctccagtagttgcattttttggaagaaataaatcaaaattaaccgttcatttaatggtaaataatattgctgtcaaatgtatttttttcaatcaaccgtatttaaaaaagaaaatcgaattaaatcaaactataactgttaaaggtaagtggaatagagttaaacaggaaattactggtaatagggttttctttaattcacaagggacacaaactcaagaaaacgcagatgttcaattagaaccagtctatcgtattaaggaaggtattaaacaaaagcaaatacgagaccaaattagacaagcgttaaatgatgtgacaattcatgaatggttaactgatgaactaagagaaaaatataaattagagaccttggactttactttgaacacattacatcatcctaaaagtaaagaggatttattacgtgctcgtagaacctatgcatttactgaactgtttttattcgaattacgtatgcaatggctaaatagattagaaaagtcatctgacgaagcaattgaaattgattatgacttagaccaagttaaatcatttattgatcgtttaccttttgaactaactgaagcacagaaatccagtgttaatgaaatttttagagatttaaaagcaccaatacgtatgcatcgattacttcaaggtgatgtaggttcaggaaaaacagtagttgctgcaatttgtatgtatgcgttaaaaacggctggttatcaatcagcattgatggtaccaactgaaattttagcagagcaacatgctgaaagtttaatggctttatttggagattctatgaacgttgcattgttaactgggtcagtaaaaggtaagaaacgaaagatacttttagaacaacttgaaaatggtacgattgattgtttaattggaacccatgctttgattcaagatgatgtgattttccataatgttggtttagtaattacagatgaacaacatcgatttggtgtgaatcaacgccagcttttaagagaaaaaggtgcaatgacgaatgtgttatttatgacagcaacgccgataccaagaacactagcaatatcagtttttggtgagatggatgtgtcttcaattaaacaattaccaaaaggtcgtaaacctatcattactacttgggcaaagcatgagcaatacgataaagttttgatgcaaatgacctcagagttgaaaaaaggtcgtcaagcatatgtcatttgcccgctaatagaaagttctgagcatctcgaagatgttcaaaatgttgtcgcattgtacgagtctttacaacagtattatggtgtttcccgtgtagggttattgcatggtaagttatctgccgatgaaaaagatgaggtcatgcaaaagtttagtaatcatgagatagatgttttagtttctactactgttgttgaagtaggtgttaatgtaccgaatgcaacttttatgatgatttatgatgcggatcgctttggattatcaactttacatcagttacgcggtcgtgtaggtagaagtgaccagcaaagttactgtgttttaattgcatcccctaaaacagaaacaggaattgaaagaatgacaattatgacacaaacaacggatggatttgaattgagtgaacgagacttagaaatgcgtggtcctggagatttctttggtgttaaacaaagtgggttgccagatttcttagttgccaatttagttgaagattatcgtatgttagaagttgctcgtgatgaagcagctgaacttattcaatctggcgtattctttgaaaatacgtatcaacatttacgtcattttgttgaagaaaatttattacatcgcagttttgactaattaccatgctgatttgtcaatttgagtgcaacacttcgttaattgagtgatatgacacttgaactatttaaatgtaaagtggtattttaacaatttataaatttccgactaaataatagctaaataatacagttatttgttgagtcggttaaatagaaagtgttatgatatgtgaggaatgtttaagactaggtactaaaaaatgaggggtgagacgttgaaactaaagaaagataaacgtagagaagcaatcagacaacaaattgatagcaatcccttcatcacagaccatgaactaagcgacttatttcaagtgagtatacaaacaattcgtttagatcgcacttatttaaacataccagaattaaggaagcgtattaaattagttgctgaaaagaattatgaccaaataagttctattgaagaacaagaatttattggtgatttgattcaagtcaatccaaatgttaaagcgcaatcaattttagatattacatcggattctgtttttcataaaactggaattgcgcgtggtcatgtgctgtttgctcaggcaaattcgttatgtgttgcgctaattaagcaaccaacagttttaactcatgagagtagcattcaatttattgaaaaagtaaaattaaatgatacggtaagagcagaagcacgagttgtaaatcaaactgcaaaacattattacgtcgaagtaaagtcatatgttaaacatacattagttttcaaaggaaattttaaaatgttttatgataagcgaggataaaattatggttaaattagcaattgatatgatgggtggcgacaatgcgcctgatatcgtattagaagccgtacaaaaggctgttgaagactttaaaaatctagaaattatgcttttcggtgacgaaaaaaagtataatctgaaccatgaacgaatcgaatttagacattgttctgaaaagattgaaatggaagatgagcctgttagagcgattaaacgtaaaaaagatagctcaatggtaaaaatggctgaagctgtgaaatctggtgaagcagatggatgtgtgtcagcaggtaatactggtgctttaatgtcagttggtttattcattgttggacgtattaaaggtgtagctagaccggctttagtagtaacattgccaacgattgatggaaaaggttttgtctttttagacgttggtgcaaatgctgatgctaaacctgaacacttattacagtatgcgcaactaggggatatttatgctcaaaaaattagaggtattgataatccgaaaatctcattattaaatataggtaccgagccagctaaaggtaatagtttaacgaaaaaatcatttgagttattaaatcaagatcattcattgaattttgttgggaatattgaagcgaagacattaatggatggcgatacagatgttgtagttaccgatggctatactgggaacatggtccttaaaaatttagaaggtactgcaaaatcaatcggtaaaatgttaaaagatacgattatgagtagtactaaaaataaattagcaggtgcaatattgaagaaagatttagcagaattcgctaaaaagatggattactcagaatacggtggttcagtattattaggattggaaggtactgtagttaaagcacacggtagttcaaatgctaaagctttttattctgcaattagacaagcgaaaatcgcaggagaacaaaatattgtacaaacaatgaaagagactgtaggtgaatcaaatgagtaaaacagcaattatttttccgggacaaggtgcccaaaaagttggtatggcacaagatttgtttaataacaatgatcaagcaactgaaattttaacttcagcagcaaagacgttagactttgatattttagagacaatgtttactgatgaagaaggtaaattgggtgaaactgaaaacacgcaaccagctttattgacgcatagttcggcattattagcagcgctaaaaaatttgaatcctgattttactatggggcatagtttaggtgaatattcaagtttagttgcagctgacgtattatcatttgaagatgcagttaaaattgttagaaaacgtggtcaattaatggcgcaagcatttcctactggtgtaggaagcatggctgcagtattgggattagattttgataaagtcgatgaaatttgtaagtcattatcatctgatgacaaaataattgaaccagcaaacattaattgcccaggtcaaattgttgtttcaggtcacaaagctttaattgatgagctagtagaaaaaggtaaatcattaggtgcaaaacgtgtcatgcctttagcagtatctggaccattccattcatcgctaatgaaagtgattgaagaagatttttcaagttacattaatcaatttgaatggcgtgatgctaagtttcctgtagttcaaaatgtaaatgcgcaaggtgaaactgacaaagaagtaattaaatctaatatggtcaagcaattatattcaccagtacaattcattaactcaacagaatggctaatagaccaaggtgttgatcattttattgaaattggtcctggaaaagttttatctggcttaattaaaaaaataaatagagatgttaagttaacatcaattcaaactttagaagatgtgaaaggatggaatgaaaatgactaagagtgctttagtaacaggtgcatcaagaggaattggacgtagtattgcgttacaattagcagaagaaggatataatgtagcagtaaactatgcaggcagcaaagagaaagctgaagcagtagtcgaagaaatcaaagctaaaggtgttgacagttttgcgattcaagcaaatgttgccgatgctgatgaagttaaagcaatgattaaagaagtagttagccaatttggttctttagatgttttagtaaataatgcaggtattactcgcgataatttattaatgcgtatgaaagaacaagagtgggatgatgttattgacacaaacttaaaaggtgtatttaactgtatccaaaaagcaacaccacaaatgttaagacaacgtagtggtgctatcatcaatttatcaagtgttgttggagcagtaggtaatccgggacaagcaaactatgttgcaacaaaagcaggtgttattggtttaactaaatctgcggcgcgtgaattagcatctcgtggtatcactgtaaatgcagttgcacctggttttattgtttctgatatgacagatgctttaagtgatgagcttaaagaacaaatgttgactcaaattccgttagcacgttttggtcaagacacagatattgctaatacagtagcgttcttagcatcagacaaagcaaaatatattacaggtcaaacaatccatgtaaatggtggaatgtacatgtaatatatttgagctaaagctcattgacgcattggttgactggtcatccaatggagaattgtctgacctagtcaactttgcgggggaaattctaagcaacctagataaggttccagaatttctccctaagaaacactaatcaataaattgataagaagattagaggaacgcttgagctaaagctcaagataaagacgcagaaatcaataaattgataactgggatagaggtacgcctgagctaaagctcaagataaagacgcagtaatcaataaattgataactgggatagaggtacacctgagctaaagctcatgcataagaaacactaatcaataaattgataagtgtttctaaaatttctacttgttttttagaatttaaaatgggaaaatataatagtctatgtataggcatttttaaaggaggtgaatcgacgtggaaaatttcgataaagtaaaagatatcatcgttgaccgtttaggtgtagacgctgataaagtaactgaagatgcatctttcaaagatgatttaggcgctgactcacttgatatcgctgaattagtaatggaattagaagacgagtttggtactgaaattcctgatgaagaagctgaaaaaatcaacactgttggtgatgctgttaaatttattaacagtcttgaaaaataataaatcttacatctgggtcgtcagtattgtcgactcagtttttttctttaattatcaatagttttaacgtaaaattaaagatgattcaagagcaacacataaaggagataaaataatgtctaaacaaaagaaaagtgagatagttaatcgttttagaaagcgctttgatactaaaatgacagagttaggctttacttatcaaaatattgatttataccaacaagcattttcgcattcgagttttattaatgattttaatatgaatcgtttagaccataatgagcgtttagagtttttgggtgatgcggtattagaattgacggtttcacgatatttatttgataaacatcccaacttgccagaagggaatttaacaaaaatgcgtgccactattgtatgtgagccctcacttgtaatatttgcgaataaaattggattgaacgaaatgattttacttggtaaaggtgaagagaaaacagggggacgtacaagaccatcattaatatcagatgcattcgaagcatttattggggcattgtatttggatcaaggactagatatagtttggaaatttgctgagaaagttattttcccacatgtagaacaaaatgagttattaggcgtggtagattttaaaacacaattccaagaatatgtgcaccagcaaaataaaggtgatgtaacctataatttaataaaagaagagggaccggcacatcatcgtctattcacttcagaagttattctgcaaggggaagcaatagctgaaggtaaagggaaaacgaaaaaagaatcagaacaacgtgctgctgaaagtgcctataagcaattaaaacaaattaaatagaaatttatatgatacgacatataggtgttcgatttaggatttaaggaagaatttttaatattttatggaacaacttcgaaatttaatatacaaatattaaaatatcgtatacatgtgttctttaaaattgtgataaggagtttaggatggtttatttaaaatcaatagatgccattggatttaagtcttttgcagatcaaaccaatgttcaattcgataaaggtgtaactgcaattgttggtccaaatggaagcggtaaaagtaatattacagatgctattaaatgggtgttgggtgaacaatcggctaaatcattacgtggctcaaaaatggaagatattatcttctcaggtgcagaacatcgcaaagctcaaaattatgctgaagtacagttaagattagataatcattctaaaaagctcagtgttgatgaaaacgaagttattgtaacaagaagattgtatcgaagtggtgaaagtgagtactacataaataatgaccgtgcaagattaaaagatattgccgatttatttttagattctggattgggaaaagaagcgtatagcattatctcgcaaggtagagttgatgaaatactaaatgctaaaccaattgatagacgtcaaattattgaagaatcggctggtgtacttaaatataaaaaacgtaaggctgaatcattaaataaacttgaccaaacagaagataatttaacgagagtagaagacattttatatgatttggaaggtcgcgtagaacctctaaaagaggaggcagctatagctaaagaatataagacactttcacatcaaatgaaacatagtgacattgtagttacagtgcacgatattgatcaatatacaaatgacaatagacaattagatcaacgtttaaatgatttacaaggtcaacaagcaaataaagaagctgacaagcaacgtttaagccaacaaattcaacaatataaaggtaaacgacatcaacttgataacgatgttgaatcgcttaattatcaattagtaaaagctacggaagcctttgaaaaatatacgggacaattaaatgttttagaagaacgtaagaaaaatcaatctgaaacaaatgcacgatatgaagaagaacaagaaaatttaatggagcttttagaaaatatatcaaatgagatttctgaagctcaagatacttataagtctctgaaaagtaaacaaaaagaactcaatgctgtcattcgtgaacttgaagaacaactatatgtttcagacgaagcacatgatgaaaaattggaagaaattaaaaacgaatactatacattaatgtcagagcaatcagatgttaacaatgatattcgttttttaaagcatactatagaagagaatgaggctaaaaaatcaagactagattctcgattagttgaagtttttgagcaattgaaagatattcagggtcaaataaaaacgacaaaaaaagaatatcaacagaccaacaaagaactttctgctgtagataaagaaattaaaaatatagaaaaagatctcactgatacaaaaaaagcacaaaatgaatacgaagagaaattgtatcaagcatatcgatataccgaaaaaatgaaaacacgtattgatagtttggcaacgcaagaggaagaatacacttattttttcaatggcgtcaaacatattttgaaagctaaaaataaagaattaaagggtattcatggtgcagttgcggaaattattgatgtgccatctaaattaactcaggcaattgaaacagcattaggtgcttcattacaacatgtcattgtagattcagaaaaagatggacgccaggctattcaatttttaaaagaacgtaatttaggtcgtgcgacgtttttaccattaaatgttatacagagtagagtggtagcgactgatattaaatctattgctaaagaggcaaacggatttattagtattgcttcggaagcagtgaaagtagcaccagaatatcaaaatattatcgggaatttattaggtaatacgattatcgttgatcatttaaagcatgcaaatgaattggcacgtgcgattaaatatcgaactcgtattgttactttggaaggtgatattgtaaaccctggtggttctatgactggtggtggcgctcgtaagtccaaaagtattctgtctcaaaaagacgagttgacaacaatgagacaccaattagaagattacttgcgtcaaacagaatcatttgaacaacaatttaaagagttgaagataaaaagtgatcaattaagtgaactgtattttgaaaaaagtcaaaagcataatacacttaaagagcaagtgcatcattttgaaatggagctcgatagattaactacacaagaaacacaaataaaaaatgatcatgaagaattcgaatttgaaaaaaatgatggttatacgagtgacaaaagtcgacaaactttgagtgaaaaagaaactcatttagaaagtattaaagcatctttaaaacgactagaagatgaaattgaacgctacacaaaactttctaaagaaggtaaggaaagcgtaactaaaacacaacaaacgttacatcagaaacaatctgatcttgctgtggttaaagagcgtattaaaacacaacaacagacaatagatcgattaaataatcaaagtcaacaaactaaacatcaattaaaagatgttaaagaaaaaattgcattctttaattcggatgaagtgatgggcgaacaagcttttcaaaatattaaagatcaaattaatggtcaacaagaaacgagaacacgcttatctgatgaattagataaattgaaacaacaacgtattgagttgaatgaacaaatcgatgcgcaggaagctacactacaagtttgtcaccaagatattttagctatcgaaaatcactaccaagatattaaagctgaacaatcaaagttagatgtattaattcatcatgcgatagatcatttaaatgatgaatatcaattgactgttgaacgtgcgaaatctgaatatacgagtgatgaatcgattgacgcattacgtaaaaaagttaagttaatgaagatgtcgattgatgaactaggtcctgtaaacttaaatgcaattgaacaatttgaagagttaaatgaacgttatacatttttaagtgaacaacgtacagatcttcgtaaagctaaagaaacattagagcaaattataagtgaaatggatcaagaggttactgaaagatttaaagaaactttccatgctattcaaggacattttacagctgtgttcaaacaattgtttggtggaggcgatgcagaattgcaattaactgaagccgattatttaacagctggtattgatattgtggtacaaccaccgggtaaaaagttgcaacatttatcgttactgagtggtggtgagcgtgcattaactgctattgctttactatttgcaattttaaaagtaagatctgcaccttttgttatattagatgaggttgaagctgcactagatgaagcaaatgttattagatacgcaaaatatttaaatgagttatcagacgaaacacaattcattgttattacacaccgtaaaggaacaatggaatttgcagataggttatacggtgtaacaatgcaagaatcaggtgttactaaacttgtgagtgtgaatttaaatacaatagatgatgtgttgaaggaggagcaataatgagcttttttaaacgcttaaaagataagtttgcaacaaataaagaaaatgaagaagttaaatccttaagagaagaacaaggtcaagacaaattagaagatacacattctgaaggttcaacgcaggacgtaaatgatttagcagaaaatgctgaagtgaaaaagaagccacgcaagttgagtgaagcggattttgatgacgatggcttaatatcaattgaagattttgaagaaattgaagctcaaaaaatgggtgctaaatttaaagcaggactcgaaaaatctcgtcaaaatttccaagaacaattaaataatttgatagcgagatatcgtaaagtagatgaagacttttttgaagctttagaagaaatgttaatcactgcagacgtcggttttaatacagtgatgacgttaactgaagaattacgtatggaagcacaacgacgtaatattcaagatactgaagatttgcgtgaagtcattgttgaaaaaatcgtagagatttaccatcaagaagatgataattcagaagctatgaacatagaagatggtcgtttaaatgtcattttaatggtcggtgtgaatggtgttggtaaaacaacaacaattggaaaattagcttaccgatataaaatggaaggtaaaaaagtaatgttagctgcgggcgatacttttagagcgggtgctattgatcaattgaaagtttggggcgaacgtgttggtgtagatgtaattagccaaagtgaaggttctgatccagctgctgttatgtatgatgcgattaatgccgctaaaaacaaaggtgttgatattttaatctgtgataccgctggacgtttacaaaataaaacaaatctaatgcaagaattagaaaaagttaagcgtgtaattaatcgagcagtgccagatgcgcctcatgaagcattactatgtttagatgctacaactggtcagaatgcgttgtcacaagctagaaactttaaagaagtaacaaatgttacaggtattgtattaacgaaattagatggtacagccaaaggtggtatcgtattagccattcgtaatgaattgcacattccagttaaatatgtaggtttaggtgagcaattagatgacttacaaccatttaaccctgaaagttatgtctacggcttattcgctgatatgattgaacaaaatgacgaaataacaacagttgaaaatgatcaaattgtaacagaagaaaaggacgataatcatggggcaaaatgatttagttaaaacgttacgaatgaattatttgtttgatttttatcaatccttattgacgaataaacaacgtaattatttggaattattttatctcgaagattattctttaagtgaaatcgcagatacttttaatgtgagtagacaagcagtttatgataatataagaagaactggcgatttagttgaagattatgaaaagaaattggaattataccagaaatttgagcaacgccgagaaatatatgatgaaatgaaacaacatttaagtaatccagaacaaatacaacgttatattcaacaattagaagacttagaatagatataaattgagggaggacatcgatatggcatttgaaggcttatcagaacgcctgcaagcgacgatgcaaaaaatgcgtggtaagggtaaacttactgaagctgatataaagataatgatgcgtgaagtaagattagcgttatttgaggctgacgtaaactttaaagtggtaaaagaatttattaaaacagtatcagaacgcgcattaggttccgatgtaatgcaatcattaacaccagggcaacaagttattaaaatagttcaagatgaattaacgaagttgatgggtggagaaaatacatcgattaatatgtcaaataaaccacctactgttgttatgatggttggtttacaaggtgctggtaaaacaacaactgcaggtaaattagcattattgatgcgtaaaaaatacaacaaaaaacctatgttagttgcagcagatatttatcgtccagcagcgataaatcaattacaaacagtagggaaacaaattgatattcctgtatacagtgaaggagatcaagtaaagccacaacaaattgtaactaatgcattaaaacatgctaaagaagaacatttagactttgtaatcattgatacagcaggtcgattacacatcgatgaagcattgatgaacgaattaaaagaagtaaaagaaattgctaaaccaaacgaaattatgttagttgtcgattcaatgacgggtcaagatgctgtcaatgttgcagaatcttttgacgatcaacttgatgtcacaggtgttaccttaactaaattagatggtgatacacgtggtggtgcagctttatctattcgttcggtgacacaaaaaccaattaaatttgttggtatgagtgaaaagttagatggtttagagctattccatcctgaacgtatggcatcacgtattttaggtatgggtgatgtgttaagtttaattgaaaaagcgcaacaagatgtggatcaagaaaaagcaaaagatttagagaaaaagatgcgtgagtcatcgtttactttagatgattttttagaacaacttgatcaggtgaaaaatctaggaccactggatgatattatgaaaatgattccaggtatgaataaaatgaaagggctagataagcttaatatgagtgaaaagcaaattgatcatattaaagcgattatccagtcaatgacgccggctgaaagaaacaatccagacacattgaatgtatcacgtaaaaagcgtattgctaaagggtctggtcgttcattacaagaagtcaatcgtttgatgaaacaatttaacgatatgaagaaaatgatgaaacaattcactggtggcggtaaaggtaaaaaaggtaaacgcaatcaaatgcaaaatatgttaaaaggtatgaatttaccgttttaatgtttaatataacacgctgatttttgttgcaatgagatgtgcatcccgaaagttatactaaagaatataactttatggggtgcatatttttagatacacaataataattaaaaactgaaattgcggatttgctagaacatgaggttattgttgctaatattaataagttatattggtggaacatgtgcgttagaagtggtaccattcatgtccttacgagataaattaacttaacacgtaggtggtgaaggctactatgaatttttataacctattaacagtctaatttagtaatcacatagttattattgtaagaaaaaggttcaataattttcctggtaaagaaaaaactctttacaaacattcatacacctgttaatattatttcttgtagaaaataaaaattaaaacatgacttaaaggagattttataaatggcagttaaaattcgtttaacacgtttaggttcaaaaagaaatccattctatcgtatcgtagtagcagatgctcgttctccacgtgacggacgtatcatcgaacaaatcggtacttataacccaacgagcgctaatgctccagaaattaaagttgacgaagcgttagctttaaaatggttaaatgatggtgcgaaaccaactgatacagttcacaatatcttatcaaaagaaggtattatgaaaaaatttgacgaacaaaagaaagctaagtaatttagcgtaaaattgttctaacaataagaataactcgtttacactgacagttattactcaatgatacgttgggaatatcacatgttagtaatatagaacgtattgggtaccataatggtgccctttttctttgaattattttcaattaaaatagaagtgttcaaagcatagagttggaggtaatagaatgagagttgaagttggtcaaattgttaacacacatggtattaaaggtgaaattaaagtaaaatccaattcagactttacagacgttcgttttcaacccggtcaagtgctgacagttgtgcataacaataacgaccttgaatatactgttaagtcacatagagtgcataaagggcttcatatgcttacatttgaaggtattaataatattaatgatattgagcatttaaaagggagttctatttatcaagagcgtgatcatgaagatatcgtacttgaggaaaatgaattttattattcagatattataggatgtacagtttttgatgatcaagaaacaccaataggtcgtgtaattaatatatttgaaacaggtgcgaatgatgtgtgggtgattaaaggatctaaagaatatttgattccttatattgctgatgttgtaaaagaagtggatgttgaaaataaaaaaattatcatcacgccaatggaaggattgttggattaatgaaaattgattatttaactttatttcctgaaatgtttgatggtgttttaaatcattcaattatgaaacgtgcccaagaaaacaataaattacaaatcaatacggttaattttagagattatgcaattaacaagcacaaccaagtagatgattatccgtatggtggcggacaaggtatggtgttaaagcctgaacctgtttttaatgcgatggaagacttagatgtcacagaacaaacacgcgttattttaatgtgtccacaaggcgagccattttcacatcagaaagctgttgaattaagcaaggctgaccacatcgttttcatatgcggacattatgaaggttacgatgaacgtatccgaacacatcttgtcacagatgaaatatcaatgggtgactatgtgttaactggcggtgagttaccggcaatgacaatgactgatgctattgttagactgattccaggtgttttaggtaatgaacagtcacatcaagacgattcattttcagatgggttattagagtttccgcaatatacacgtccgcgtgaatttaagggtctaacagttccagatgttttattgtctggaaatcatgccaatattgatgcatggagacatgagcaaaagttgatccgcacatataataaaagacctgacttaattgaaaaatatccattaactaatgaagataagcaaatattagaaagatataaaataggattgaaaaaaggttagtattgtgctaacatattctgagtgtggaaacacaaaaatcactatgatccgctgctatatatttgtcgaggcaagaacataggttgaagaggagaatttataatgacaaatcacaaattaatcgaagcagtaactaaatcacaattgcgtacagacttaccaagtttccgtcctggtgatactttacgtgtacacgtacgtatcattgagggtactcgtgagcgtatccaagtattcgaaggcattgtaattaaacgtcgtggcggtggcgtttctgaaacgtttacagttcgtaaaatttcatcaggtgttggcgtggaacgtacattcccattacacacaccaaaaattgaaaaaatcgaagttaaacgtcgtggtaaagtacgtcgtgctaaattatattacttacgtagtttacgtggtaaagctgctagaatccaagaaattcgttaatcagcatttaaacaaagctatgtatgagtcaaattcgactcaaacaataaagccatctaggtcacttttatggagtgatatagatggctttttttgctgtttagttaatgtaaagttgataatgtaattgttttttcttatttattcataacgtgtttgctcaaaaatgcttatataaacaaaaatctactaagtgccattgaaaaggacttagtagatttattaaatatatgcgtagcaacattatttttgtcttgcccatctcgtgaaaataatactacatataatgccaaatatagtaattgttataagtaaataatagtatggtggggtatagctcaattgaatctttgttatatttttaggtgctttaatgccggtcataacaccatttacttgtgcaactttaagactttgatcacctgatgtcgctttcataccttgattatatgctgttggcaaaacaatatacccagatgaatttttatttttagtaatagtataaccttgctttgtcttactaactttgacagcctctaatgaatttgaagcgtctttaagcgtggtataatcttcgccgtatatcccttttaaatttactcgatacttacctttaggcaatgataatctaattctatctgaagctttaatgcgtatcgttacgggtgttacaaagcgtcgatatttataagtgagtttatttctttcttgtgtatattcattcactttaacatcatgagctttatccggcgaaagtaattctaaatccatttcaaaatacaaatctttaaattgattagaaactgattttggcaactgtacagttagaccaccattattttgtttaacttgtaataaatgttttgtaggagattgccaggctgaactatttaatttaattgttgaatctgatagtaaatttttattggctttaaaatgtgtattaacatctttagtattgttagaaacaatcccttgcaacattgcttgttctttatctaatggagattttaattctttattggaaaagaccttatttgtaatatgtgcacttggataatggatggtatttttagaatgaatccaacgaactttattgtctttgtgttcagagttaattttaaatctatatggtaagttgtcatcatgattcactctaattcgatcattaacattccaaagtgatagtaaattttgacgattgccaagtaatctataagtgctgtttttatcaattggcatattaatttggagtgtcttgtcataatattttaaaatgtctccattaaaaatactagaatataatgaaatgccattataatgatatataaatggtgaatttaatgcatagtctgacatataatcaatgcgattaaatgggcctgttgcattttgatttatcttttttataagctggtttacatagttactatggtaatcatgttgtttcaacgttgataatgattgttgataaggtttgattgccatatttttgttgttatctaaaatgacgatttgttgaatcataacgattaatactaatattgcaacggttaattttttataacgccataaactaaattttaaaataacggcaagcaccattagcaggataatacctactataagtgcaagtgggtgtgtcggtgatagtaatacataaagtaatgcgatgatacttactggtattgttctgattaaataatatttcatatttaatgttgataaatgttgaataaacaatccgcaaagagcgcttgatgatagtgctaagatatacacccaacgcctttctggaaatgaaaaaccattaaaagcactgtcgaaatactgtgataatgaaccaataaataatatccatgttactattgcgaaaagtctataaaagtaaaaacgatacagtttgaatgacaataatgcaacgatagtaagaattgaaatcgtaatataaaatccatcgctaaagaaaaaataatgataatcaagtggtgtcaaaaacggtatatcaacattgggattttgctttctgtcattttccaaaaacgcagaaatgccagtgaataaaccaaatacacttgataacacactcaaaactgtagcagatatgacgcaaataaatttttgtgttctagagacaatgtcatatttgtaagtgaaaatgagtcgatataaatagtagcaacctataataatagcttgataataactgaaataaaaattgctaaatagtgttaaggctatcgcaacaatgaaaataccgattttgcgttgttgaaaatatctttccaaaccaagaatcgataatggcaataaatataataaatttccataaaatgaccaagtaaaattaaagtatataacgacagttgacatgccgtataaaatcgtagcgatcatatttgttgagcgtttaaagtgtaatattttaaataagtagaaggtcacgacaaatgttatgatagctcgtatcatagccataataagttggtttgtcggccaaaaatgtattgttgtcggattaaatataccaaccgtttctcctattttaatgaatagaaaatttagccacattaaaggtgacagcgaataataatatgatagtcctttcatataatcgccacctaatccaaacgatgcatcatataaactagaaaaactacttagatgttcatacaaatacatttgaaatggcatcatttgacggaatccatctccagccccactaaaaacagtaccattcacaatataatcatagatatgagtagaaaataaaataagcgttaatattacactaatgaaagttataacaaagaattgtttgacgtttgaatttagccacttttttaacacaacattatcctcaactttcaaatttaaaattaagtttaactgaaactaaagttaatgaggttcttgataggtaaagacgaagatgactgtggaacagataccttatcatagttacttaaactttggatcattttcagtttatcattaaacaaatatattgaataataaaaatgtcatactgataaagatgaatgtcacttaataagtaacttagatttaacaaatgatgatttttaattgtagaaaacttgaaataatcacttttacctaaatctaaagcattgttaagaagtgtgacaatgttaaaataaatatagttgaattaatgaatttgttctataattaacaggttatagattttaataatgagaaaagaattgacgaaagtaaggtgaattgaatggttattcaatggtatccaggacatatggcgaaagccaaaagagaagtaagtgaacaattaaaaaaagtagatgtagtgtttgaactagtagatgcaagaattccatatagttcaagaaaccctatgatagatgaagttattaaccaaaaaccacgtgttgttatattaaataaaaaagatatgtctaatttaaatgagatgtcaaaatgggaacaattttttattgataaaggatactatcctgtatcagtggatgctaagcacggtaaaaatttaaagaaagtggaagctgcagcaattaaggcgactgctgaaaaatttgaacgcgaaaaagcgaaaggacttaaacctagagcgataagagcaatgatcgttggaattccaaatgttggtaaatccacattaataaataaactggcaaagcgtagtattgcgcagactggtaataaaccaggtgtgaccaaacaacaacaatggattaaagttagtaatgcattacaactattagacacaccagggatactttggcctaaatttgaagatgaagaagtcggtaagaagttgagtttaactggtgcgataaaagatagtattgtgcacttagatgaagttgccatctatggattaaactttttaattcaaaatgatttagcgcgattaaagtcacattataatattgaagttcctgaagatgcagaaatcatagcgtggtttgatgcgatagggaaaaaacgtggcttaattcgacgtggtaatgaaattgattacgaagcagtcattgaactgattatttatgatattcgaaatgctaaaataggaaattattgttttgatatttttaaagatatgactgaggaattagcaaatgacgctaacaattaaagaagttacgcagttgattaatgcggttaatacaatagaagaattagaaaatcatgaatgctttttagatgagcgaaaaggtgttcaaaatgccatagctaggcgcagaaaagcgttagaaaaagaacaagctttaaaagaaaagtatgttgaaatgacttactttgaaaatgaaatattaaaagagcatcctaatgctattatttgtgggattgatgaagttggaagaggacctttagcaggtccagtcgttgcatgcgcaacaattttaaattcaaatcacaattatttgggccttgatgactcgaaaaaagtacctattacgaaacgtctagaattaaatgaagcactaaaaaatgaagttactgcttttgcatatggtatcgcgacagctgaagaaatagatgaatttaatatttataaagctactcaaatcgccatgcagcgagctattgatggattatcagtacaaccaacgcatttattgatagacgcgatgacgcttgataatgcactgcctcaagtatctttaatcaagggtgatgcaagaagtgtgtccattgcagctgcaagtatcatggcgaaggtttttcgtgatgattatatgacacagttatctaaagattatcctgaatacggttttgaaaaaaacgcgggttatggtaccaaacaacatttactagcaatcgatgatattggcattatgaaagagcatagaaaaagctttgaacctataaaatcgttactgtaaatcgtaaaattcaattaaatgataaaaaagtagcatttaagtttacaatagcgcttacattttttataattgtaagggaacttaacctaagtaacaggaggatggaagatgaatatccacgagtatcaaggtaaagaaatatttcgttcaatgggcgttgcagttccagaaggacgagtagcatttactgctgaagaagcggtggagaaagcaaaagaattaaattctgatgtatatgttgtaaaagcacaaattcatgctggaggtagaggtaaagcaggcggagtaaaaattgctaaatctttatctgaggtagaaacatatgcaaaagaattattagggaaaactttggtgacacatcaaactggtccagaaggtaaagaaattaaacgtttatatatcgaagaaggttgtgctattcaaaaagaatattacgttggattcgttattgatcgtgcgactgaccaagtaacattgatggcgtctgaagaagggggcactgagattgaagaagttgctgcgaagactcctgaaaagatcttcaaagaaactatcgatccagtaatcggactttcaccattccaagcaagacgaattgcgtttaatattaatattcctaaagaatctgttaacaaagctgctaaattcttattagcactttataatgtattcattgaaaaagattgttcaatcgtagaaatcaacccattagttacaacagctgatggtgatgtattggcattagatgctaaaattaattttgatgataatgcattattcagacataaagatgttgtagaattacgtgatttagaagaagaagatccgaaagagattgaagcgtctaaacatgatttatcatacattgcattagatggtgacatcggatgtatggttaatggtgcaggtttagccatggcaacaatggatacgattaatcatttcggtggaaacccagccaatttcttagatgcaggcggaagcgctactagagaaaaagtaactgaagcatttaaaatcattttaggtgatgaaaatgttaaaggtatttttgtaaacattttcggtggcattatgaaatgtgatgttatcgcagaaggtatcgttgaagctgtaaaagaagtagatttaactttaccactagttgtacgcttagaaggtacaaatgttgagttaggtaaaaaaatcttaaaagactcaggattagcaattgaaccagcagcaacaatggctgaaggtgcacaaaaaattgttaaactagtcaaagaagcataaggaaaggatgggagcactaagatgagtgtatttatagataagaatactaaagtaatggtacaaggtattacagggtctactgcccttttccatacaaaacaaatgcttgattatggtacgaaaatagtagcaggtgtgacgcctggtaaaggtggtcaagttgttgaaggcgttcctgttttcaacactgttgaagaagctaaaaatgaaactggggcaacggtttcagtcatttacgttccagcaccatttgctgcagactcaattttagaagcagctgatgcagacttagatatggttatttgtatcactgaacatattcctgtattagacatggttaaagttaaacgctacttacaaggtagaaaaacacgtttagttggtccgaactgtccaggtgtgattacagcagatgaatgtaaaattggtattatgcctggctatattcacaaaaaaggtcatgttggtgtagtatcacgttcaggtacactaacatatgaagcagtgcaccaattgactgaagaaggtattggtcaaactacagctgttggtattggtggagacccagtcaacggaacaaactttattgatgttttaaaagcattcaatgaagatgacgaaacgaaagcagttgttatgattggtgaaatcggtggtacagctgaagaagaagcagctgaatggattaaagcgaatatgacaaaaccagttgtaggctttatcggtggacaaacagcacctcctggaaaacgtatgggacatgctggtgcaatcatttcaggtggtaaaggtactgctgaagagaaaataaaaacattaaatagttgtggtgtgaaaacagcggcaacaccttcagaaattggttcaacattaattgaagctgctaaagaagcaggtatttatgaatcattattaacagttaataaataaagttaaaagatgatataaatggctatagcccattccatactttataaaagtatcggaaatgggctatttgtcgtgcaatgaattttagtacacttttcatattttggaaagacaagttaattattttacctcctacaatagctttataaaacaaagaaaattttaattaaaatatatagtgcactacgttataatgtttatatattattgtaaggagtgttccatcatgaataaacaacaaagtaaagtacgctattcaattagaaaagttagtattggaattttgtcaatttcaataggtatgtttttggcattgggtatgtcgaacaaagcatatgcagatgaaattgataaatctaaagattttacaagagggtatgagcaaaatgtattcgcgaaatcagagttaaatgctaataaaaatacgacaaaagacaaaataaaaaatgaaggtgctgttaaaacatcggacacaagtttaaagttagacaacaaatcagcaatttcaaacggaaatgaaattaatcaagatataaagatttcaaatactccgaaaaactcaagccaaggtaacaatctagttattaataacaatgaacctactaaagaaattaaaattgcaaacttggaagctcaaaattctaatcagaagaaaacgaataaagttactaataattactttggttactacagttttagagaagctccaaaaacacaaatctatactgtaaaaaaaggagacacacttagtgctatagcattaaaatacaaaactacagtttcaaatattcaaaatacaaataatatagcaaatcctaatttaatatttattggtcaaaaattaaaagtgccaatgacaccattagtagaaccaaaaccaaaaacagtgtcttcaaataataaaagtaatagtaatagcagtacattaaattatttgaaaacattagagaatagaggatgggatttcgacggtagttatggatggcaatgtttcgatttagttaatgtatattggaatcatctttatggtcatggattaaaaggatatggagctaaagatataccatatgcaaataattttaatagtgaagctaaaatttatcacaacacaccaactttcaaagctgaacctggggacttagtggtttttagtggaagatttggtggaggatatggtcatacagctattgtcttaaatggtgattatgatggaaaattaatgaagttccaaagtttagatcaaaactggaataatggtggatggcgtaaagcagaggttgcacataaagttgttcataattatgaaaatgatatgatttttattagaccatttaaaaaagcataatttaaatcgaaggcaggacattgaaatatgaaattttcaactttaagtgaagaagaatttaccaactacaccaaaaagcacttcaaacattatacacagtctatagaattatataattatagaaataaaataaatcatgaagcacatattgtgggagtgaagaatgataaaaatgaagttatagctgcatgtttattaacagaggcacgaatttttaaattctacaaatatttctactctcatagaggtcctttacttgattatttcgatgctaaattagtttgttacttttttaaagaattatctaaattcatttataaaaatagaggagtatttattcttgttgatccatatttaatagagaatttaagagatgcaaatggtaggataataaagaattataataattcagtgatagtaaagatgctagggaaaattgggtatctccatcaaggttatacaacaggatattcaaataaaagtcaaattaggtggatttctgtattggatttaaaagataaagatgagaatcaacttttaaaagaaatggaataccaaactagaagaaatataaaaaagactattgagattggtgttaaggttgaagatttatctattgaagaaacaaatcgattttataaattgtttcaaatggctgaagaaaaacatggttttcatttcatgaatgaagattattttaaacgaatgcaagaaatatataaagataaggcaatgttaaagatagcttgtataaatcttaatgaatatcaagataaattaaaaatacaattattgaaaatcgaaaatgaaatgatgactgtgaacagagcattaaatgaaaatccaaattctaaaaagaataaatcaaaattaaatcagttaaatatgcaattatctagtattaataatagaattagtaaaaccgaagaactaatattagaagatggacctgttttggatttagctgctgctttatttatatgtactgatgatgaagtttattatctatcaagtggatcaaatccgaaatataatcagtatatgggtgcatatcatctacaatggcatatgataaaatatgcaaaatcacataatattaataggtataatttttatggaataacaggcgtctttagtaatgaggcggatgattttggtgttcaacaatttaaaaagggttttaatgcacatgttgaagaattaattggtgatttcatcaaaccagtaagaccaattctatataaatttgcaaaacttatttataaggtttaattataaagtatgttggaaattgaaattttaaattctttccaacatacttttcactttttaagtcagtatttttactccttaaaataacattacatcgacaatgtttttgtattagaaatgtaaaacaaaaatagaatatgattttgtatgattacaaaaaggagttgatttattgattaaactatttttgcttaagttatactgggcacacttttcgactaaacaaattcatcaatttttaatggcatatcctaatgtaattaaagaggagggaagaaaaaaagatagttatttatgtgaatgggtgaatagggaagaaaatgttcttttattacgtaaatactatgcttttataaaacttgatcataacgatattattaaagaactgcagaaattaaaagtaagttacattacatatatggattctgaatacccagtgctattaaaagaaatatatcaatttccattacttcttttctataaagggaacatcaaattaataaaaataatatgcatcatttggcagtagtaggtgcaagagattctacaagttatacccaacagtctttagaatttttattatcaaatgataaaagcaaatatttaacaattgtttccggccttgctcaaggagctgatgcaatggcacatcaaatagctttaaaatacaatctccctacaattgcagttttagcctttggccatcaaacacattatcccaaaagtacattagcattaagaaataaaatagaagaaaaaggtttagttatatccgaatatccaccacatacaccaattgctaaatatagatttcctgagcgcaatagaattatcagcggtttgtcaaaaggggttttaattactgaggctaaggaacaaagtggcagtcacatcacgatagattttgtattagagcaaaatagaaatgtttatgttttacctggatctatgtttaatcctatgacaaaaggtaatttattacgtatccaagaaggtgctaaggtagtattaaacgctaatgatatatttgaagactactatatttaaaactaaaaataacgagttgcttcatatttcttttgttaccctttgtaatttattttttaataaaatctataaaaaatagacagggaaaatgatttgtttagatataaaacgttgacaaaagcaaaattaagcgtttatcatttatctttagtaattagattagcgagggggaaatgacattggcagataatttagtcattgttgaatcgcctgcaaaagcaaaaaccattgaaaagtatttaggtaagaaatataaagttatagcttcaatgggacacgtcagagacttaccaagaagtcaaatgggtgtcgacactgaagataattacgaaccaaaatatataacaatacgcggaaaaggtcctgttgtaaaagaattgaaaaaacatgcaaaaaaagcgaaaaacgtctttctcgcaagtgaccccgaccgtgaaggtgaagcaattgcttggcatttatcaaaaattttagagcttgaagattctaaagaaaatcgcgttgttttcaacgaaataactaaagacgctgttaaagaaagttttaaaaatcctagagaaattgaaatgaacttagtcgatgcacaacaagcgcgtcgaatattagatagattggttggctataacatctcgccagttctatggaaaaaagtgaaaaaaggtttgtcagcgggtcgagttcaatctgttgcacttcgtttagtcattgaccgtgaaaatgaaattcgaaactttaaaccagaagaatattggactattgaaggagaatttagatacaaaaaatcaaaattcaatgctaaattccttcattataaaaataaaccttttaaattaaaaacgaaaaaagatgttgagaaaattacagctgcactagatggagatcaattcgaaattacaaacgtgactaaaaaagaaaaaacgcgtaatccagcaaacccatttacaacttctacattacaacaagaggcggcacgtaaattaaactttaaagcaagaaaaacaatgatggtcgcacaacaattatatgaaggtatagatttgaaaaaacaaggtacgattggtttaataacatatatgagaaccgattctacacgtatttcagatactgccaaagctgaagcaaaacagtatataactgataaatacggtgaatcttacacttctaaacgtaaagcatcagggaaacaaggtgaccaagatgcccatgaggctattagaccttcaagtactatgcgtacgccagatgatatgaagtcatttttgacgaaagaccaataccgattatacaaattaatttgggaacgatttgttgctagtcaaatggctccagcaatacttgatacagtctcattagacataacacaaggtgacattaaatttagagcgaatggtcaaacaatcaagtttaaaggatttatgacactttatgtagaaactaaagatgatagtgatagcgaaaaggaaaataaactgcctaaattagagcaaggtgataaagtcacagcaactcaaattgaaccagctcaacactatacacaaccacctccaagatatactgaggcgagattagtaaaaacactagaagaattgaaaattgggcgaccatcaacttatgcaccgacaatagatacgattcaaaagcgtaactatgtcaaattagaaagtaagcgttttgttcctactgagttgggagaaatagttcatgaacaagtgaaagaatacttcccagagattattgatgtggaattcacagtgaatatggaaacgttacttgataagattgcagaaggcgacattacatggagaaaagtaatagacggtttctttagtagctttaaacaagatgttgaacgtgctgaagaagagatggaaaagattgaaatcaaagatgagccagccggtgaagactgtgaagtttgtggttctcctatggttataaaaatgggacgctatggtaagttcatggcttgctcaaacttcccggattgtcgtaatacaaaagcgatagttaagtctattggtgttaaatgtccaaaatgtaatgatggtgacgtcgtagaaagaaaatctaaaaagaatcgtgtcttttatggatgttcgaaatatcctgaatgcgactttatctcttgggataagccgattggaagagattgtccaaaatgtaaccaatatcttgttgaaaataaaaaaggcaagacaacacaagtaatatgttcaaattgcgattataaagaggcagcgcagaaataatatttttattccctagagacattttaagattgttaaatagaatcattagtgaatcttattttaaagatagtaatggattaatctaaataagtgcggataatataaacataacaacataattaaaagacataaatgacaataaaaggagtatagaaatgactcaaactgtaaatgtaataggtgctggtcttgccggttcagaagcggcatatcaattagctgaaagaggaattaaagttaatctaatagagatgagacctgttaaacaaacaccagcgcaccatactgataaatttgcggaacttgtatgttccaattcattacgcggaaatgctttaactaatggtgtgggtgttttaaaagaagaaatgagaagattgaattctataattattgaagcggctgataaggcacgagttccagctggtggtgcattagcagttgatagacacgatttttcaggttatattactgaaacacttaaaaatcatgaaaatatcacagttattaatgaagaaattaatgccattccagatggatacacaattatcgcaacaggaccacttactacagaaacccttgcgcaagaaatagtggacattactggtaaagatcaactttatttctatgatgcagctgctccaattattgaaaaagaatctattgatatggataaagtttacttaaagtcccgttatgataaaggtgaagctgcatatttaaactgtcctatgactgaggatgaatttaatcgcttttatgatgcagtattagaagctgaagttgcacctgtaaattcatttgaaaaagaaaaatatttcgagggttgtatgccttttgaagtaatggcagaacgcgggcgcaagacattactatttggaccaatgaaaccagtaggattagaagatccaaagactgggaaacgtccttatgcagtggttcaattaagacaagatgacgctgctggcacactctacaatattgtcggcttccaaacacatttaaaatggggagctcaaaaagaagtcattaaattaattccaggtttagagaatgttgatattgttagatatggtgtgatgcatagaaataccttcattaactcaccggacgtattaaacgaaaaatatgaattgatttcacaaccaaacatacagtttgcgggacaaatgactggtgttgaaggttatgtagaaagcgcagctagcggcttagttgcaggtatcaatcttgcgcataaaatattaggcaaaggtgaggtagtatttccgagagaaactatgattggaagtatggcttactatatttctcatgctaaaaacaataagaatttccaacctatgaatgctaacttcgggttattaccatctttagaaactagaattaaagataaaaaagaacgctatgaagcacaagctaatagagctttggattacttagaaaatttcaaaaaaactttataaaatagttagaaagactagatatgctattcattcttaagtcatcaacgagtaagtaatgactttctaaatggaaaatacttatcctagtctttttaattttggaattgttacgtatttctgacaatttagaattcgtattcaaaaaaatatctaaataaataacacgcaataagttgattgatgtaacatgtaagagaatgttttaaataaactttatttaaaagacaatgaaataataaatggcaaggctattaataaagacttttagtaattaatttaaaaaagaggtattctaattaacaggttttccgattagttacaattatttaattctcaaaagatttagaattgattatcaaattactgtaagccctttgctgtatatgctacaattcttattgatggagggtaaatgtattgaatcatattcaagaagcgtttttaaatacattgaaagttgaacggaatttttcggaacatacattgaaatcatatcaagatgacttaattcagtttaatcaatttttagaacaagaacatttacagttgaaaacttttgaatacagagatgctagaaattatttgagctatttatattcaaatcatttgaaaagaacatctgtttctcgtaaaatctcaacgttaagaactttctatgaatattggatgacgcttgatgagaacattattaatccatttgttcaattagtacatccgaaaaaagaaaaatatcttccgcaattcttttacgaagaagaaatggaagcgttattcaaaactgtagaagaggacacttcaaaaaatttacgggatcgagttattcttgaattgttgtatgctacaggcatccgtgtttcggaattagtaaatattaaaaaacaagatatagatttttacgcgaatggtgttaccgtattaggaaaagggagcaaagagcgttttgtaccgtttggtgcttattgtagacaaagcatcgaaaattatttagaacatttcaaaccaattcagtcatgcaatcatgattttcttattttaaatatgaagggtgaagcaatcactgaacgcggtgtacgatatgttttaaatgatattgttaaacgaacagcaggcgtaagtgagattcatccccacaagctcagacatacatttgcaacgcatttattgaatcaaggtgcagacctaagaacagtacaatcgttattaggtcatgttaatttgtcaacaactggtaaatatacacacgtatctaaccaacaattaagaaaagtgtatctaaatgcacatcctcgagcgaaaaaggagaatgaaacatgagtaatacaacattacatgcaacaacaatttatgctgtaagacataatgggaaagcagctatggctggagatggacaagtaacgcttggtcaacaagtcatcatgaaacaaacggcaagaaaagtgcgacgtttatatgaaggtaaagtgttagctggtttcgcaggtagtgtagcagatgcgtttacgttatttgaaaaatttgaaacaaaattacaacagtttagtggtaacttagaaagagctgctgttgaattggcacaagaatggcgaggcgataaacaattacgtcaattagaagctatgctaattgtaatggataaagatgctattttagttgtcagtggaactggcgaagttattgccccagatgatgaccttatcgctattggatcagggggcaactacgcattaagcgcaggacgtgcattgaaacgccatgcatcgcatttgtctgctgaagaaatggcatatgagagcttgaaagtagcggctgatatttgtgtctttaccaacgataatattgttgttgaaacactataataatcagagcacgataaataattacgaccaattaattttagttaaaagacggaggaatgaaattaatggatacagctggaataagattaactccaaaagaaatcgtatctaaattaaatgaatatatcgttggacaaaatgatgctaaacgtaaagtggcaattgccctacgtaatcgatacagaagaagtttattagatgaggaatcaaagcaagaaatttcacctaaaaatattttgatgattggaccaaccggcgttggtaaaactgaaattgcaagaagaatggccaaagttgtcggcgcgccatttataaaagtagaagctactaaatttactgaggtaggttatgtaggacgagatgttgaaagtatggttagagatcttgttgatgtttcagtaagattagtcaaggcgcagaaaaaatcattggtacaagatgaagcaacagctaaggccaatgaaaaacttgttaagttattagttccaagtatgaaaaagaaagcgtctcaaacgaataatcctttagagtcacttttcggaggtgcaattccaaatttcggacaaaataacgaagatgaagaagaaccacctactgaggaaattaaaacaaaacgttctgaaattaagagacagctagaagaaggcaaacttgaaaaagaaaaggtaagaattaaagtcgaacaagatcctggtgctttaggtatgctaggtacaaatcaaaatcagcaaatgcaagagatgatgaatcaattaatgcctaaaaagaaagttgagcgagaagttgctgttgagacggcaaggaaaatcttagctgatagttatgcggatgaactaattgatcaagaaagcgctaaccaagaagcgcttgaattagcagaacaaatgggtatcatctttatagatgaaatcgacaaagttgcgacgaataatcataatagtggtcaagatgtctcaagacaaggtgttcaaagagatattttacctatacttgaaggtagcgttattcaaaccaaatatggtactgtgaatactgaacatatgctgtttataggtgctggagctttccatgtatctaagccgagtgacttgataccagaattgcaaggtcgttttccgattagagttgaacttgatagtttatcggtagaagattttgtaagaattttgacagaaccaaaattgtcattaattaaacaatatgaagcattgcttcaaacagaagaagttactgtaaactttaccgatgaagcaattactcgcttagctgagattgcttatcaagtaaatcaagatacagacaacattggtgcacgtcgacttcatacaattttagaaaagatgctagaagatttatcattcgaagcaccaagtatgccgaatgcagttgtagatattaccccacaatatgttgatgataaattaaaatcaatttcaacaaataaagatttaagtgcatttattctataaaaatatacaaaaggagaaaaattcatgagcttattatctaaaacgagagagttaaacacgttacttcaaaaacacaaaggtattgcggttgattttaaagatgtagcacaaacgattagtagcgtaactgtaacaaatgtatttattgtatcgcgtcgaggtaaaattttagggtcgagtctaaatgaattattaaaaagtcaaagaattattcaaatgttggaagaaagacatattccaagtgaatatacagaacgattaatggaagttaaacaaacagaatcaaatattgatatcgacaatgtattaacagtattcccacctgaaaacagagaattattcatagatagtcgtacaactatcttcccaattttaggtggaggagaaagattaggtacattagtacttggtcgagtacatgatgattttaatgaaaatgatttggtactaggtgaatatgctgctacagttattggtatggaaatcttacgtgagaagcatagtgaagtagaaaaagaagcgcgcgataaagctgctattacaatggcaattaattcattatcttattctgaaaaagaagcgattgaacatatctttgaagaacttggcggtacggaaggcctattaatcgcatcaaaagttgcagatagagttggtattactagatctgtaattgtaaatgcactacgtaaattagaaagtgctggtgtaattgaatcacgttctttaggaatgaaaggtactttcattaaagttaaaaaagaaaaattcttagatgaattagaaaaaagtaaataagtcgatgagtctgggacataattcaatgtcctagtcgtgacgatgttatcttggcagtagtcaactcaacgaaatgactttgatgattatgttgaagtcatttctttatttttgtctaattttcaatcaaattgatatttcacattaacttgatagaattacctttaaatttatggaaaaatgcttgaaaaacatttgctttagacacggcattatgttatatttattttcggctataaagccaatacacacatatcaaacgtgattgtgtaaagggtgcaatatttatatattgtctttacaatagtttgctatggaggtaattaaccaataggaggaatttataatggcagtaatttcaatgaaacaattactagaagcgggtgttcacttcggtcaccaaacacgtcgttggaacccaaaaatgaaaaaatatatcttcactgagagaaatggtatttatatcatcgacttacaaaaaacagtgaaaaaagtagacgaggcatacaacttcttgaaacaagtttcagaagatggtggacaagtcttattcgtaggaactaaaaaacaagcacaagaatcagttaaatctgaagcagaacgtgctggtcaattctacattaaccaaagatggttaggtggattattaactaactataaaacaatctcaaaacgaatcaaacgtatttctgaaattgaaaaaatggaagaagatggtttattcgaagtattacctaaaaaagaagtagtagaacttaaaaaagaatacgaccgtttaatcaaattcttaggcggaattcgtgatatgaaatcaatgcctcaagcattattcgtagttgacccacgtaaagagcgtaatgcaattgctgaagctcgtaaattaaatattcctatcgtaggtatcgttgacactaactgtgatcctgacgaaattgactacgttatcccagcaaacgacgatgctatccgtgcggttaaattattaactgctaaaatggcagatgcaatcttagaaggtcaacaaggcgtttctaatgaagaagtagctgcagaacaaaacatcgatttagatgaaaaagaaaaatcagaagaaacagaagcaactgaagaataatcaactgttgaatctgacttagatatagtttaaatgggtgataagatattaatgcttatcaccttttttaaaaagaaaatcgaggcaaattacaaatattcaattagagtattggcaatcttgcctataataatgctaaaatcataatatataaaatgataacttattggaggaataatgaatggcaactatttcagcaaaacttgttaaagaattacgtaaaaaaactggcgcgggtatgatggattgtaaaaaagcgctaactgaaactgatggtgacatcgataaagcgattgattacctacgtgaaaaaggtattgctaaagcagctaaaaaagcagaccgtattgcggctgaaggtttagtacatgtagaaactaaaggtaacgacgcagttatcgttgaaatcaactctgaaacagactttgttgctcgtaacgaaggattccaagagttagttaaagaaatcgctaatcaagtattagatacaaaagctgaaactgttgaagctttaatggaaacaactttaccaaatggtaaatcagttgatgaaagaattaaagaagcaatttcaacaatcggtgaaaaattaagtgttcgtcgttttgctatcagaactaaaactgataacgatgctttcggcgcttacttacacatgggtggacgcattggtgtattaacagttgttgaaggttcaactgacgaagaagcagcaagagacgttgctatgcatatcgctgcaatcaaccctaaatatgtttcttctgaacaagttagcgaagaagaaatcaaccacgaaagagaagttttaaaacaacaagcattaaatgaaggtaaaccagaaaacatcgttgaaaaaatggtggaaggacgtttacgtaaatacttacaagaaatttgtgctgtagatcaagacttcgttaaaaaccctgatgtaacagttgaagctttcttaaaaacaaaaggtggaaaacttgttgacttcgtacgctatgaagtaggcgaaggtatggaaaaacgcgaagaaaactttgcggatgaagttaaaggacaaatgaaataatctgtcataaagtaaaacaaggaagaagacacctttaatgttgctttattaaaatgtaaatcattctaataaaacgacaactgtgtcttctttacttgtatatgttacatatattcacgatagagaggataagaaaatggctcaaatttctaaatataaacgtgtagttttgaaactaagtggtgaagcgttagctggagaaaaaggatttggcataaatccagtaattattaaaagtgttgctgagcaagtggctgaagttgctaaaatggactgtgaaatcgcagtaatcgttggtggcggaaacatttggagaggtaaaacaggtagtgacttaggtatggaccgtggaactgctgattacatgggtatgcttgcaactgtaatgaatgccttagcattacaagatagtttagaacaattggattgtgatacacgagtattaacatctattgaaatgaagcaagtggctgaaccttatattcgtcgtcgtgcaattagacacttagaaaagaaacgcgtagttatttttgctgcaggtattggaaacccatacttctctacagatactacagcggcattacgtgctgcagaagttgaagcagatgttattttaatgggcaaaaataatgtagatggtgtatattctgcagatcctaaagtaaacaaagatgcggtaaaatatgaacatttaacgcatattcaaatgcttcaagaaggtttacaagtaatggattcaacagcatcctcattctgtatggataataacattccgttaactgttttctctattatggaagaagggaatattaaacgtgctgttatgggtgaaaagataggtacgttaattacaaaataaatttagaggtgtaaaataatgagtgacattattaatgaaactaaatcaagaatgcaaaaatcaatcgaaagcttatcacgtgaattagctaatatcagtgcaggaagagctaattcaaatttattaaacggcgtaacagttgattactatggtgcaccaacacctgtacaacaattagcaagcatcaatgttccagaagcacgtttacttgttatttctccatacgacaaaacttctgtagctgacatcgaaaaagcgataatagcggctaacttaggtgtcaacccaacaagtgatggtgaagtgatacgtattgcagtacctgccttaacagaagagcgtagaaaagagcgcgttaaagatgttaagaaaattggtgaagaagctaaagtatctgttcgaaatattcgtcgtgatatgaatgatcagttgaaaaaagatgaaaaaaatggcgacattactgaagatgagttgagaagtggtactgaagatgttcagaaagcaacagacaattcaataaaagaaattgatcaaatgattgctgataaagaaaaagatattatgtcagtataaaactaatatacaatgacatattaaaatgccagtattaaacgataatgtaacatttaaaatgggcatgtttaattaaatcaaagatgcatgtgataatttaaattcacaatgagcataaaaatggtgtttaaacaagttaattaaacatatactttataaataataggcattaggtatattgctataataaagttatgtaatttttaacctcagtatgtatgtcacatttctggtgtaaactgtaccgagtcagactttggtacagtttttttatttgcttattcaatgcattaaatgagtatgataaaatgataatgattgtttagtaacttatattatatgacagagatgatcaggctcggaggaaagaccatgtttaaaaagctaataaataaaaagaacactataaataattataatgaagaattagactcgtctaatatacctgaacatatcgctattattatggatggtaatgggcgatgggctaagaagcgaaaaatgcctagaattaaaggccattacgaaggtatgcaaacaataaaaaaaattactaggatagctagtgatattggtgttaagtacttaactttatatgccttttccactgaaaattggtcaagacctgaaagtgaagtaaattatattatgaatttgcctgtcaatttcttaaagacattcttaccggaactaattgaaaaaaatgtcaaagttgaaacaattggatttactgataagttgccaaaatcaacgatagaagcaattaataatgctaaagaaaagacagctaataataccggcttaaaattaatatttgcaattaattatggtggcagagcagaacttgttcatagtattaaaaatatgtttgacgagcttcatcaacaaggtttaaatagtgatatcatagatgaaacatatataaacaatcatttaatgacaaaagactatcctgatccagagttgttaattcgtacttcaggagaacaaagaataagtaatttcttgatttggcaagtttcgtatagtgaatttatctttaatcaaaaattatggcctgactttgacgaagatgaattaattaaatgtataaaaatttatcagtcacgtcaaagacgctttggcggattgagtgaggagtagtatagtatgaaagttagaacgctgacagctattattgccttaatcgtattcttgcctatcttgttaaaaggcggccttgtgttaatgatatttgctaatatattagcattgattgcattaaaagaattgttgaatatgaatatgattaaatttgtttcagttcctggtttaattagtgcagttggtcttatcatcattatgttgccacaacatgcagggccatgggtacaagtaattcaattaaaaagtttaattgcaatgagctttattgtattaagttatactgtcttatctaaaaacagatttagttttatggatgctgcattttgcttaatgtctgtggcttatgtaggcattggttttatgttcttttatgaaacgagatcagaaggattacattacatattatatgcctttttaattgtttggcttacagatacaggggcttacttatttggtaaaatgatgggcaaacataagctttggccagtaataagtccgaataagacaatcgaaggattcataggtggcttgttctgtagtttgatagtgcctcttgcaatgttatattttgtagatttcaatatgaatgtatggatattacttggagtgacattgattttaagtttatttggtcaattaggtgatttagtggaatcaggatttaagcgtcatttcggcgttaaagactcaggtcgaatactacctggacacggtggtattttagaccgatttgacagctttatgtttgtgttaccattattaaatattttattaatacaatcttaatgctgagaacaaatcaataaacgtaaagaggagttgctgagataatttaatgaatctcagaactccttttgaaaattatacgcaatattaactttgaaaattagacgttatattttgtgatttgtcagtatcatattataatgacttatgttacgtatacagcaatcaattttaaaataaaagaaatttataaacaatcgaggtgtagcgagtgagctatttagttacaataattgcatttattattgtttttggtgtactagtaactgttcatgaatatggacatatgttttttgcgaaaagagcaggcattatgtgtccagaatttgcgatcggtatggggccaaaaatttttagttttagaaaaaatgaaacactttacactattaggttattgcctgttggtggatatgttcgtatggcaggagatggcttagaagagccaccagtcgagcccggtatgaacgttaaaattaaactgaatgaagaaaatgaaataacacatatcatattagatgatcatcataagtttcaacaaattgaagcgatcgaagttaaaaaatgtgattttaaggatgacttattcatagaaggtatcactgcttatgataatgaaagacatcattttaaaattgctagaaagtctttctttgttgaaaatggtagcttagttcaaattgctccgagagacagacaatttgcacataaaaagccatggccgaaatttttaacattatttgcgggaccgttatttaactttatattagctttagtcctatttattggtcttgcatattatcaaggtacacctacgtctactgtagaacaagtcgcagataagtatccagctcaacaagcaggattacaaaaaggtgataaaattgttcaaattggcaaatataaaatatctgaatttgatgatgttgataaggcgttagataaagttaaagataataagacgactgttaaatttgaacgtgatggtaaaacgaagtcagttgaattaacacctaaaaagactgaaagaaaactgactaaagtaagttcagagacgaagtatgttctcggattccaaccagcgagtgaacatacacttttcaaaccaattgtatatggatttgaaagctttttgaaaggtagtacactaatttttacagctgtagtcggtatgttggctagtatatttacgggcggattctcatttgatatgttaaatggtccggttggtatttatcataacgtcgactcagttgttaaagcgggtatcattagcttaattggttacactgcgttattaagtgtaaacttaggtattatgaatttaattcctattcctgcactagacggtggtcgtattttatttgttatatatgaagcgattttcagaaaaccagttaataaaaaagcggaaacaacgattattgctattggtgccattttcatggtcgttattatgatattagtaacgtggaatgatattcgacgatatttcttataatttaggaggataaataattatgaagcaatccaaagtttttataccaacgatgcgtgatgtgccatcagaagcagaagcacaaagtcatcgtttattattgaaatcgggtttgataaaacaaagtacaagtgggatttatagttatttaccgctagcaacacgtgtgttaaataatattactgcaattgtgcgacaagaaatggaacgtatcgattctgttgaaattttaatgccagcgttacaacaagctgaattatgggaagaatcaggacgttggggtgcatatggcccagaattaatgcgtttacaagatagacatggaagacaatttgcattaggtccaacacatgaagaattagttacatcaatagtaagaaatgaattgaaatcatacaaacaattaccgatgacattattccaaattcaatctaaattccgtgatgaaaagagaccacgttttggtttacttcgtgggcgtgaatttattatgaaagatgcgtattcattccatgctgacgaggcatcattagatcaaacgtatcaagatatgtatcaagcgtatagccgtatttttgagagagttggcattaatgctagaccagttgtagcagattcaggtgctataggcggtagccatacacatgaatttatggcattaagtgctatcggtgaggatacaatcgtttacagtaaagaaagtgactatgctgctaatatcgaaaaagcagaagtcgtttacgaaccaaatcataagcattctactgtgcaacctttagaaaaaattgaaacaccaaatgttaagactgcacaagaattggcagacttcttaggtagaccagtagatgaaatcgttaaaacgatgattttcaaagttgatggcgaatatattatggttttagtgcgtggccatcatgaaattaatgacattaaattaaaatcttatttcggcacagataatattgaattagcaacacaagacgaaattgttaatttagttggtgcaaatccgggttcactaggtcctgttattgataaagaaatcaaaatttatgcagataattttgtgcaagatttaaataatttagttgtcggtgctaacgaagatggctatcacttaattaatgtaaatgtaggtagagacttcaacgttgatgaatatggcgatttccgttttattttagaaggcgaaaagttaagtgatggttcaggcgttgcacattttgctgaaggtattgaagttggtcaagtattcaaattgggtactaagtattcagaatcaatgaatgctacattcttagataaccaaggaaaagctcaacctttaattatgggctgttacggtattggaatttctagaacgctaagtgcgattgttgaacaaaatcacgatgataatggaattgtttggcctaaatcagttactccatttgatttacatttaatttctattaatcctaagaaagatgatcaacgagagctagcagatgcactatatgctgaatttaatactaaatttgatgtgttgtacgatgatcgtcaggaacgtgcaggtgtcaaatttaatgatgccgatttaattggtttaccactgcgaattgttgttggtaaacgtgcatcggaaggtattgtagaagttaaagaacgtttaacaggtgatagcgaagaagttcacattgatgacttaatgactgtcattacaaataaatatgataacttaaaataattaagatcgaatgaattataagagtaggaaaaagctgaaagaaatctgatgcttatgtcctgctcttattatttttgatataatgattattcgatgaaaaatgactgaagacatagtataattaaagataaatttgttttaacaatattatgattagccaaatataaagcatttaattttctatcattactatgctcacataatctaaatattgttcgaacacgtaaaagtaatttctatttaaggtggtaattgtcttggcaatgacagagcaacaaaaatttaaagtgcttgctgatcaaattaaaatttcaaatcaattagatgctgaaattttaaattcaggtgaactgacacgtatagatgtttctaacaaaaacagaacatgggaatttcatattacattaccacaattcttagctcatgaagattatttattatttataaatgcaatagagcaagagtttaaagatatcgccaacgttacatgtcgttttacggtaacaaatggcacgaatcaagatgaacatgcaattaaatactttgggcactgtattgaccaaacagctttatctccaaaagttaaaggtcaattgaaacagaaaaagcttattatgtctggaaaagtattaaaagtaatggtatcaaatgacattgaacgtaatcattttgataaggcatgtaatggaagtcttatcaaagcgtttagaaattgtggttttgatatcgataaaatcatattcgaaacaaatgataatgatcaagaacaaaacttagcttctttagaagcacatattcaagaagaagacgaacaaagtgcacgattggcaacagagaaacttgaaaaaatgaaagctgaaaaagcgaaacaacaagataacaacgaaagtgctgtcgataagtgtcaaattggtaagccgattcaaattgaaaatattaaaccaattgaatctattattgaggaagagtttaaagttgcaatagagggtgtcatttttgatataaacttaaaagaacttaaaagtggtcgtcatatcgtagaaattaaagtgactgactatacggactcattagttttaaaaatgtttactcgtaaaaacaaagatgatttagaacattttaaagcgctaagtgtaggtaaatgggttagggctcaaggtcgtattgaagaagatacatttattagagatttagttatgatgatgtctgatattgaagagattaaaaaagcgacaaaaaaagataaggctgaagaaaagcgtgtagaattccacttgcatactgcaatgagccaaatggatggtatacccaatattggtgcgtatgttaaacaggcagcagactggggacatccagccattgcggttacagaccataatgttgtgcaagcatttccagatgctcacgcagcagcggaaaaacatggcattaaaatgatatacggtatggaaggtatgttagttgatgatggtgttccgattgcatacaaaccacaagatgtcgtattaaaagatgctacttatgttgtgttcgacgttgagacaactggtttatcaaatcagtatgataaaatcatcgagcttgcagctgtgaaagttcataacggtgaaatcatcgataagtttgaaaggtttagtaatccgcatgaacgattatcggaaacgattatcaatttgacgcatattactgatgatatgttagtagatgcccctgagattgaagaagtacttacagagtttaaagaatgggttggcgatgcgatattcgtagcgcataatgcttcgtttgatatgggctttatcgatacgggatatgaacgtcttgggtttggaccatcaacgaatggtgttatcgatactttagaattatctcgtacgattaatactgaatatggtaaacatggtttgaatttcttagctaaaaaatatggcgtagaattaacgcaacatcaccgtgccatttatgatacagaagcaacagcttacattttcataaaaatggttcaacaaatgaaagaattaggtgtattaaatcataacgaaatcaacaaaaaactcagtaatgaagatgcatataaacgtgcaagacctagccatgtcacattaattgtacaaaaccaacaaggtcttaaaaatctatttaaaattgtaagtgcatcattggtgaagtatttctaccgtacacctcgaattccacgttcattgttagatgaatatcgtgagggattattggtaggtacagcgtgtgatgaaggtgaattatttacggcagttatgcagaaggaccagagccaagttgaaaaaattgccaaatattatgattttattgaaattcaaccaccggcactttatcaagatttaattgatagagagcttattagagatactgaaacattacatgaaatttatcaacgtttaatacatgcaggtgacacagcgggtatacctgttattgcgacaggaaatgcacactatttgtttgaacatgatggtatcgcacgtaaaattttaatagcatcacaacccggcaatccacttaatcgctcaactttaccggaagcacattttagaactacagatgaaatgttaaacgagtttcattttttaggtgaagaaaaagcgcatgaaattgttgtgaaaaatacaaacgaattagcagatcgaattgaacgtgttgttcctattaaagatgaattatacacaccgcgtatggaaggtgctaacgaagaaattagagaactaagttatacaaatgcgcgtaaactgtatggtgaagacctgcctcaaatcgtaattgatcgattagaaaaagaattaaaaagtattatcggtaatggatttgcggtaatttacttaatttcgcaacgtttagttaaaaaatcattagatgatggatacttagttggttcccgtggttcagtaggttctagttttgtagcgacaatgactgagattactgaagtaaacccgttaccgccacactatatttgtccgaactgtaaaacgagtgaatttttcaatgatggttcagtaggatcaggattcgatttacctgataagacgtgtgaaacttgtggagcgccacttattaaagaaggacaagatattccgtttgaaacatttttaggatttaagggagataaagttcctgatatcgacttaaactttagtggtgaatatcaaccgaatgcccataactacacaaaagtattatttggtgaggataaagtattccgtgcaggtacaattggtaccgttgctgaaaagactgcttttggttatgttaaaggttatttgaatgatcaaggcatccacaaaagaggcgctgaaatagatcgactcgttaaaggatgtacaggtgttaaacgtacaactggacagcatccaggaggtattattgtagtacctgattacatggatatttatgattttacgccgatacaatatcctgccgatgatcaaaattcagcatggatgacgacacattttgatttccattctattcatgataatgtattaaaacttgatatacttggacacgatgatccaacaatgattcgtatgcttcaagatttatcgggcattgatccaaaaacgatacctgtagatgacaaagaagtcatgcaaatatttagtacacctgaaagtttaggtgttactgaagatgaaattttatgtaaaacaggtacgtttggggttccagaattcggtacagggttcgtgcgtcaaatgttagaagatacaaagccaacaacattttctgaattagttcaaatctcaggattatctcatggtacagatgtgtggttaggcaatgctcaagaattaattaaaaccggtatatgtgatttatcaagtgtaattggttgtcgtgatgatatcatggtttatttaatgtatgctggtttagaaccatcaatggcttttaaaataatggagtcagtacgtaaaggtaaaggtttaactgaagaaatgattgaaacgatgaaagaaaatgaagtgccggattggtatttagattcatgtcttaaaattaagtacatgttccctaaagcccatgcagcagcatacgttttaatggcagtacgtatcgcatatttcaaagtacatcatccactttattactatgcatcttactttacaattcgtgcgtcagattttgatttaatcacgatgattaaagataaaacaagcattcgaaatactgtaaaagacatgtattctcgctatatggatctaggtaaaaaagaaaaagacgtattaacagtcttggaaattatgaatgaaatggcgcatcgaggttatcgaatgcaaccgattagtttagaaaagagtcaggcgttcgaatttatcattgaaggcgatacacttattccgccgttcatatcagtgcctgggcttggcgaaaacgttgcgaaacgaattgttgaagctcgtgacgatggcccatttttatcaaaagaagatttaaacaaaaaagctggattatctcagaaaattattgagtatttagatgagttaggctcattaccgaatttaccagataaagctcaactttcgatatttgatatgtaaaatgaaataatcaaggtatttatttaatgcgtatggcgtagttaaagaaatacaaaattggtgctggacataaaattatgcctgtatttcttttcaacgtcttacgagtctattcgaatgtaatggtgaaataaatgaacaaacttttacaagaatctctgattaatagtgaagtcatttgtttcaagcataaacttatgctataattaagttgcttaaaaattagtgaactcaggcagaagagtgggagattcccgctcttttctatttgccaaaaagggaggcctgtatgagtaaaattacagaacaagtagaagtgattgttcaaccaattatggaagacttgaattttgaacttgtagacgttgaatatgtcaaagagggtagagatcattttcttagaatctctattgataaagaaggtggcgtagatttaaatgattgtacgctagcttctgaaaaaataagtgaagctatggatgcaaatgatcctattcctgaaatgtattatttagacgtagcgtcacctggtgcagaacgtccaattaaaaaagaacaagatttccaaaatgcaataactaaacctgtatttgtttctttatatgtaccaattgaaggtgaaaaggaatggttaggcattttacaagaagtcaataatgaaacaattgtagtacaagttaaaatcaaagcaagaacgaaagatatagagataccgagagacaaaatagcaaaagcacgtcacgcagttatgatttaacgtgatgaggaggaaaaaacgtgtcaagtaatgaattattattagctactgagtatttagaaaaagaaaagaagattcctagagcagtattaattgatgctattgaagcagctttaattactgcatacaaaaagaattatgatagtgcaagaaatgtccgtgtggaattaaatatggatcaaggtactttcaaagttatcgctcgtaaagatgttgttgaagaagtatttgacgacagagatgaagtggatttaagtacagcgcttgttaaaaaccctgcatatgaaattggtgatatatacgaagaagatgtaacacctaaagattttggtcgtgtaggtgctcaagcagcgaaacaagcagtaatgcaacgtcttcgtgatgctgaacgtgaaattttatttgaagaatttatagacaaagaagaagacatacttactggaattattgaccgtgttgaccatcgttatgtatatgtgaatttaggtcgtatcgaagctgttttatctgaagcagaaagaagtcctaacgaaaaatatattcctaacgaacgtatcaaagtatatgttaacaaagtggaacaaacgacaaaaggtcctcaaatctatgtttctcgtagccatccaggtttattaaaacgtttatttgaacaagaagttccagaaatttacgatggtactgtaattgttaaatcagtagcacgtgaagctggcgatcgctctaaaattagtgtcttctctgaaaacaatgatatagatgctgttggtgcatgtgttggtgctaaaggcgcacgtgttgaagctgttgttgaagagctaggtggcgaaaaaatcgacatcgttcaatggaatgaagatccaaaagtatttgtaaaaaatgctttaagcccttctcaagttttagaagttattgttgatgaaacaaatcaatctacagtagttgttgttcctgattatcaattgtcattagcgattggtaaaagaggacaaaacgcacgtctagctgctaaattaaccggctggaaaattgatattaaatcagaaacagatgcgcgtgaagcgggtatctatccagtagttgaagctgaaaaagtaactgaagaagatattgctttagaagatgctgacacaacagaatcaaccgaagaggtaaatgatgtttcagttgaaacaaatgtagagaaagaatctgaataataggttggagtgaagtatctatgaaaaagaaaaaaattccgatgcgaaaatgtattctttcaaatgaaatgcatcccaaaaaagatatgattcgtgttgttgttaataaagaaggcgaaatctttgcggatgttactggaaagaaacaaggccgtggcgcatatgtttctaaagatgttgctatggttgaaaaagcacaacaaaaagaaattttagaaaaatattttaaagcatctaaagagcaattggatcctgtttacaaagaaattattagattaatttatagagaagagattccaaaatgagtatagatcaaatattaaactttttaggattagcaatgagagctggtaaagtaaaaacaggtgaatcagtcattgttaatgagattaaaaaaggaaatttgaagctcgttattgttgcaaatgatgcgtctgataatacagctaaattaattacagataaatgtaagagttacaaagttccattcagaaagtttggaaatcgaaatgaattgggaatagcacttggaaaaggtgagcgtgttaatgtagggattactgacccaggctttgctaaaaagttgctatcaatgatagatgaatatcataaggagtgattatatgagtaaacaaagaatttacgaatatgcgaaagaattaaatctaaagagtaaagagattatagatgagttaaaaagcatgaatatagaggtttcaaatcatatgcaagctttggaagatgaccaaattaaagcattagataaaaagttcaaaaaagaacaaaagaacgacaataaacaaagcactcaaaataatcaccaaaaatcaaacaatcaaaaccaaaataaagggcaacaaaaagataacaaaaagaatcaacaacaaaataataaaggcaacaaaggcaataaaaagaataatagaaataataagaaaaataacaagaataataaaccacaaaatcaaccagctgctccaaaagaaataccatcaaaagtgacatatcaagaaggtattacagtaggcgaatttgcggataaattaaatgttgaatcatcagaaattatcaaaaaattattcttacttggtattgttgctaatatcaatcaatcattaaatcaagaaacaatcgaattaattgccgatgattatggcgttgaggttgaagaagaagttgtgattaatgaagaagatttatcaatctacttcgaagacgaaaaagatgatccagaagcaattgagagaccagcagttgtaacaattatgggacatgttgaccatggtaaaacgactttattagattcaattcgtcatacaaaagttacagcaggtgaagcaggcggaatcactcaacatattggtgcatatcaaattgaaaacgatggcaaaaaaatcactttcttagatacaccgggacatgctgcatttacaacgatgcgtgcgcgtggtgcacaagtaacagatattacaattttagtagtagcagctgacgatggtgttatgccacaaacaattgaagcaattaaccatgctaaagaagcagaagtaccaattattgttgcagtaaataaaattgataaaccaacttcaaatcctgatcgagttatgcaagaattaactgaatatggtttaattcctgaagattggggcggcgaaacaattttcgttccactttctgcattaagtggtgatggtatcgacgatttattagaaatgataggattagttgcagaagttcaagaacttaaagcaaatcctaaaaaccgtgctgttggtacagttatcgaagctgaattagataaatcacgtggtccttctgcatcattattagtacaaaacggtacattaaatgttggtgatgcgattgtagttggtaatacttacggccgtatccgtgcaatggttaatgacttaggtcaaagaatcaaaacggctggtccatcaacgcctgttgaaattacaggtattaatgatgtgccacaagctggggatcgctttgttgtatttagtgatgaaaaacaagctcgtcgtattggtgaatcaagacacgaagctagcattgtacaacaacgtcaagaaagtaaaaatgtttcattagataacctgtttgaacaaatgaaacaaggtgaaatgaaagatttaaacgttattattaaaggtgatgttcaaggttctgttgaagctttagctgcatcattaatgaaaattgatgttgaaggcgtaaatgttcgtatcattcatacagcggttggtgcaattaatgagtcagacgtgacacttgctaatgcctcaaatggtattatcattggtttcaatgttcgtccagacagtggtgcaaaacgtgctgcagaagctgaaaatgttgatatgcgtttacacagagttatttataatgttatcgaagaaattgaatcagcgatgaaaggtttacttgatccagaatttgaagaacaagttatcggacaagctgaagttcgtcaaacattcaaagtttctaaagttggtactattgctggatgttatgttactgaaggtaaaattacgcgaaatgctggtgtacgtattattcgtgatggtattgttcaatatgaaggcgaattagatacacttaaacgtttcaaagatgatgctaaggaagttgcaaaaggttatgaatgtggtattacaattgaaaactacaatgaccttaaagaaggcgatgttatcgaagcatttgaaatggttgaaattaagcgttaattaaataaattacaagctaaaagtatagttaagattgatatgctccctataaatattgcactttttaagtgtctactttatagggagcatatttgatactagcttttggttttttattagaatagattacctattaaaagttacgttatatggacatgattttgtataaaattttgtggtggcctagaatgatttttaatgacaaaatataatgtcgactattattggaaaattttctgttgaaatgcctatcttacggcaaactttatttgattttataggcttaatttattaaaataacgtgtgagctaaaataattgtttaagcattgttacactaaaaaatgcaaataacaattgaacttaaagataaagaggtgacaagaatgagcagtatgagagcagagcgtgttggtgaacaaatgaagaaggaattaatggatatcatcaacaataaagtcaaagatcctcgagttggttttattacaattacagatgttgttttaacaaatgatttatcgcaggctaaagtatttttaactgtattaggtaacgataaagaagtagaaaatacatttaaagcacttgataaagcaaaaggcttcattaagtctgaattaggttctagaatgcgattacgtattatgccggaattaatgtatgaatatgatcaatcaatcgaatatggtaataaaattgaacgaatgattcaagatttacacaaacaagatagataatttagtgttaggtatctggaaaatgtttgataatttcttaatatcggtatattaacattaaacagttaatacatagatgtgtagaaatagttaacattttccagtttttttatgaataaattcagttgatacgctattaaaatatattttaaaaaagaaggtgactatatgtataatgggatattaccagtatataaagagcgcggtttaacaagtcatgacgttgtattcaaattgcgtaaaatattaaaaactaaaaaaataggtcacacgggtacgcttgatcccgaagttgcaggcgtgttaccggtatgtataggtaatgcaacgagagttagtgattatgttatggatatgggcaaagcttatgaagcaactgtatcgataggaagaagtacaacgactgaagatcaaacgggtgatacattggaaacaaaaggtgtacactcagcagattttaataaggacgatattgaccgattgttagaaaattttaaaggtgttattgaacaaattccgccaatgtattcatcagtcaaggtgaatggcaaaaaattatatgaatatgcgcgtaataatgaaacagttgaaagaccaaagcgtaaagttaatattaaagacattgggcgtatatctgaattagattttaaagaaaatgagtgtcattttaaaatacgcgtcatctgtggtaaaggtacatatattagaacgctagcaactgatattggtgtgaaattaggctttccggcacatatgtcgaaattaacacgaatcgagtctggtggatttgtgttgaaagatagccttacattagaacaaataaaagaacttcatgagcaggattcattgcaaaataaattgtttcctttagaatatggattaaagggtttgccaagcattaaaattaaagattcgcacataaaaaaacgtattttaaatgggcagaaatttaataaaaatgaatttgataacaaaattaaagaccaaattgtatttattgatgatgattcagaaaaagtattagcaatttatatggtacaccctacaaaagaatcagaaattaaacctaaaaaagtctttaattaaaggagatagaatttatgaaagtcatagaagtgacacatcctatacaatctaaacagtatattacagaggatgttgcaatggcattcggatttttcgatggcatgcataaaggtcatgacaaagtctttgatatattaaatgaaatagctgaggcacgcagtttaaaaaaagcggtgatgacatttgatccgcatccgtctgtcgtgttgaatcctaaaagaaaacgaacaacgtatttaacaccactttcagataaaaccgaaaaaattagccaacatgatattgattattgtatagtggttaatttttcatctaggtttgctaatgtgagcgttgaagattttgttgaaaattatataattaaaaataatgtaaaagaagtcattgctggttttgattttacttttggtaaatttggaaaaggtaatatgactgttcttcaagaatatgatgcgtttaatacgacaattgtgagtaaacaagaaattgaaaatgaaaaaatttctacaacttctattcgtcaagatttaatcaatggtgagttgcaaaaagcgaatgatgctttaggctatatttattctattaaaggcactgtagtgcaaggtgaaaaaaggggaagaactattggcttcccaacagctaacattcaacctagtgatgattatttgttacctcgtaaaggtgtttatgctgttagtattgaaatcggcactgaaaataaattatatcgaggggtagctaacataggtgtaaagccaacatttcatgatcctaacaaagcagaagttgtcatcgaagtgaatatctttgactttgaggataatatttatggtgaacgagtgactgtgaattggcatcatttcttacgtcctgagattaaatttgatggtatcgacccattagttaaacaaatgaacgatgataaatcgcgtgctaaatatttattagcagttgattttggtgatgaagtagcttataatatctagagttgcgtatagttatataaacaatctataccacacctttttcttagtaggtcgaatctccaacgcctaactcggattaaggagtattcaaacattttaaggaggaaattgattatggcaatttcacaagaacgtaaaaacgaaatcattaaagaataccgtgtacacgaaactgatactggttcaccagaagtacaaatcgctgtacttactgcagaaatcaacgcagtaaacgaacacttacgtacacacaaaaaagaccaccattcacgtcgtggattattaaaaatggtaggtcgtcgtagacatttattaaactacttacgtagtaaagatattcaacgttaccgtgaattaattaaatcacttggtatccgtcgttaatcttaatataacgtctttgaggttggggcatatttatgttccaaccttaatttatattaaaaaagctttttacaaatattaacatttattatatgttaagctaatattgagtgaataataaggttacaatgagataaagatgatataagtacacctagagtaataatcaagatattaaaaataaagtatgttttttaaaaaatataacttatatttatactgataagggtgggacgataagtctattttgtaaataatagatggatatcccgctctctttttttccaattcaatattttataactaatattaaaatacgataataaatgatatgatataactattagattcaagagaggagatttataatgtctcaagaaaagaaagtttttaaaactgaatgggcaggaagatctttaacgattgaaacagggcaattagctaaacaagcaaatggcgctgtattggttcgttatggagatacagtcgtgttatcgacggcaactgcatcaaaagaacctcgtgatggagatttcttcccattaacagtgaactacgaagaaaaaatgtacgctgcgggtaaaattcctggtggatttaaaaagagagaaggacgtcctggtgacgatgcaacattaactgcgcgattaattgatagaccaattagacctttattccctaaagggtataagcatgatgttcaaattatgaacatggtattaagtgcagatcctgattgttcaccacaaatggctgcaatgattggttcatctatggcgcttagtgtgtcggatattccattccaagggccaatcgccggtgtaaatgtgggttatattgatggtaaatatatcattaacccaacagtagaagaaaaagaagtttctcgtttagaccttgaagtagctggtcataaagatgcagtaaacatggtagaggcaggcgctagtgagattactgaacaagaaatgttagaggcgattttctttggtcatgaagagattcaacgtttagttgatttccaacaacaaatcgtcgaccacattcaacctgttaaacaagaatttattccagcagagcgtgatgaagcgctagttgaacgtgtgaaatctttaaccgaagaaaagggacttaaagaaacagttttaacatttgataaacaacaacgagatgaaaatcttgataacttaaaagaagaaatcgtcaatgaatttatcgatgaagaagatccagagaatgaattacttattaaagaagtttatgcaattttaaatgaattagtgaaagaagaagttcgacgtttaattgcagatgaaaaaattagaccagacggccgtaaacctgatgaaatccgtccattagattctgaagttggtattttacctagaacgcatggttcaggtctatttacacgtggtcagactcaagcactttcagttttaacattaggtgctttaggcgattatcaattaattgatggtttaggacctgaagaagaaaaaagattcatgcatcattataacttcccgaacttttcagtaggtgaaactggtccagtacgtgcgccaggtcgtcgtgaaattggacatggtgcgttaggtgaaagagcattaaaatatattattcctgatactgctgatttcccatatacaattcgtattgtaagtgaggtacttgaatcaaacggttcatcatctcaagcgtcaatttgtggatcaaccttagcattaatggatgcgggcgtaccgattaaagcaccagttgctggtattgctatgggccttgttacacgtgaagatagctatacgattttaactgatatccaaggtatggaagatgcattaggtgatatggactttaaagtcgctggtactaaagaaggtattacagcaatccaaatggatattaaaattgacggtttaacgcgtgaaattatcgaagaggctctagaacaagcgagacgtggtcgtttagaaataatgaatcatatgttacaaacaattgatcaaccacgtactgaattaagtgcttacgcgccaaaagttgtaactatgacaattaaaccagataagattagagatgttatcggacctggtggtaaaaaaattaacgaaattattgatgaaacaggcgttaaattagatattgaacaagatggtactatctttattggggccgttgatcaagctatgataaatcgtgctcgtgaaatcattgaggaaattacacgtgaagcggaagtaggtcaaacttatcaagccactgttaaacgtattgaaaaatacggtgcgtttgtaggcctattcccgggtaaagatgcgttgcttcacatttcacaaatttcaaaaaatagaattgaaaaagtggaagatgttttaaaaatcggtgacacaattgaagttaagattactgaaattgataaacaaggtcgagtaaatgcatcacacagagcattagaagaataatatttaaagtcatatgacgacaatgtatcgtcatgtgatttttttatgccattttttacgaagtgatccattttgaatttgttgtattgaacattttaaaacgctttattattttgagtgcaactgttaattatcctgtatgtatagtgattaatagtgtacatcaagtgttttttaacttataatgaatagtgagtttatatatggacgggtaacaaatttaggaggtaagattttgagtttaataaagaaaaagaataaagatattcgcattataccattaggcggtgttggcgaaattgctaaaaatatgtatatcgttgaagtagacgatgaaatgtttatgttagatgctggacttatgtttccagaagacgaaatgctaggtattgatattgttataccagacatttcatacgtacttgaaaataaagataaattgaagggtatattccttacacacggacatgagcacgcgattggtgcagtgagttatgttttagaacaattagatgcaccagtatatggatctaaattgacaatagcgttaattaaagaaaatatgaaagcccgtaatattgataaaaaagttcgctactacacagttaacaatgattcaattatgagattcaaaaacgtgaatattagtttctttaatacgacacacagtattcctgatagtttaggtgtttgtattcacacttcatatggtgccattgtgtatacaggtgaatttaagtttgaccaaagtttacatggacattatgcaccagatattaaacgtatggcagagattggtgaagaaggcgtatttgtcttaatcagtgattctactgaggcagagaaacctggatataatactccggaaaatgtaattgaacatcatatgtatgatgcttttgcaaaagtgcgaggtcgcttgattgtttcatgttatgcttcgaactttatacgtattcagcaagttttaaatattgctagcaagctaaatcgtaaagtgtcatttttaggaagatcacttgaaagttcatttaatattgctcgtaaaatggggtatttcgacattcctaaagatttgctaattcctataacagaagttgataattatcctaaaaatgaagtgataattatagctactggtatgcaaggagaacctgtagaagccttaagtcaaatggcgcaacataagcataaaattatgaatatcgaagaaggcgattctgtatttttagcaattacggcttctgctaatatggaagttatcattgcgaatacattaaatgagcttgtacgtgctggcgcacatattattccaaataacaagaagattcatgcttcaagtcatggttgcatggaagaattaaaaatgatgattaatattatgaaacctgaatactttattcctgtacaaggtgaatttaaaatgcagatagcacatgcgaagctagcagctgaagcaggtgttgcaccggaaaagattttccttgtggaaaaaggagatgtcattaattacaacggtaaagatatgatattaaatgaaaaggtaaattcgggaaatattttaatagatggtattggtattggggatgtaggaaatatcgtgttgagagaccgtcatcttttagcagaagatggtatctttattgctgtagtaacgttagatcctaaaaatagacgtatagctgcgggtcctgaaattcaatctcgtgggtttgtatatgtacgtgaaagtgaagacttattacgtgaagcagaagagaaagtacgtgaaatagtagaagctggtttacaagaaaaacgcatagaatggtctgaaattaagcaaaatatgcgtgatcaaattagtaaactattattcgaaagtacaaaacgtcgtcctatgattattccagtaatttctgaaatttaatcaaaaagtcattaacataaaagaggtcagaacaagtcaccgaaatataatggttgtcatggacaatttacttatattttatgatggtcaattgaaaggggtaacgattaatctgttatcttaagtaaattgatacatagatgatattgttctaacctctttcatcgtctgtttggactacatattctaaacatcaaataggaaattatatataataacgtcgttttaactaaggcaacataaggaggtgcgtcaattggcacaagcaaaaaagaaatcgacagctaagaaaaaaacagcatcaaaaaaaagaacaaattcaaggaaaaagaagaatgataatccgatacgttatgtcatagctattttagtagttgtattaatggtgttgggtgttttccaattaggaataatcggtcgtctaattgacagcttctttaattatttatttgggtacagtagatatttaacatatattttagtactcttagcaactggttttattacatactctaaacgtattcctaaaactagacgaacggctggttcgattgtattgcaaattgcattgctatttgtatcacagttagtttttcattttaatagtggtatcaaagctgaaagagaacctgtactttcttatgtatatcagtcataccaacacagtcattttccaaattttggtggcggtgtattaggtttttatttattagagttaagcgtacctttaatttcattatttggtgtatgtattattactattttattattatgctcaagtgttattttattaacaaaccatcaacatcgtgatgttgcaaaagttgcactggaaaatataaaagcttggtttggttcatttaatgaaaaaatgtcggaaagaaaccaagaaaaacaattgaagcgtgaagaaaaagcgagacttaaagaagaacaaaaggcacgtcaaaatgaacagccacaaataaaagatgtgagtgattttacggaagtgcctcaagaaagagatattccaatttatgggcatactgaaaatgaaagtaaaagccagtgtcaaccaagtcgaaaaaaacgagtgtttgatgcagagaatagttcgaataacatcgtaaatcatcaagcagatcagcaagagcaattaacagaacaaactcataacagtgttgaaagtgaaaacactattgaagaagctggtgaagttacgaatgtatcgtatgttgttccaccgttaactttacttaatcaacctgcaaaacaaaaagcaacatctaaagctgaagtacaacgtaaaggacaagtactagagaatacattaaaagattttggggtaaatgcaaaagtgacacaaattaaaattggtcctgcagtaactcaatatgaaattcaaccagctcaaggggttaaagtgagtaaaattgtaaacttgcataatgatattgcattagctttagcagcaaaagatgttagaatcgaagcaccaatacctggtcgctctgcagtaggtattgaagtgccaaatgagaaaatttcattagtttcactaaaagaagttttagatgaaaaattcccgtctaataataaactagaagttggattaggaagagatatatcaggtgatccaattactgttccactaaatgaaatgccacacttattggtggcaggatcgacgggtagtggtaaatctgtttgtataaatggtattattacaagtattttattaaatgctaagccgcatgaagttaaacttatgttaatcgatccgaaaatggttgaactaaatgtttataacggaattccacatttattaattccggttgttacaaatcctcataaagctgctcaagctttagaaaaaattgtagctgagatggaaagacgttatgatttattccaacattcatcaactagaaatattaaaggttataacgaattaatccgtaagcaaaatcaagaattagatgagaagcaaccagaattaccttatatcgttgttattgtagatgagcttgcagatttaatgatggtagctggtaaagaagttgaaaatgcgattcaacgtatcacacaaatggcacgtgcagcaggtatacatttgattgtagcaacacaaagaccttctgtggatgtaattacaggtatcattaaaaataacattccatctagaattgcttttgctgtgagttctcaaacagattcaagaactattattggtactggcggcgcagaaaagttacttggtaaaggtgacatgttatacgttggaaatggtgattcatcacaaacacgtattcaaggggcgtttttaagtgaccaagaggtgcaagatgttgtaaattatgtagtagaacaacaacaggcaaattatgtaaaagaaatggaaccagatgcaccagtggataaatcggaaatgaaaagtgaagatgctttatatgatgaagcgtatttgtttgttgttgaacaacaaaaggcaagtacatcattgttacaacgccaatttagaattggttataatagagcatctaggttgatggatgatttagaacgcaatcaggtaatcggtccacaaaaaggaagcaagcctagacaagttttaatagatcttaataatgacgaggtgtaaaaaaatgtcagaaatgaatgcggtatataacgttaaacaatacattttaaatttgattaagcaaaataaattggaatatggtgaccaacttccaagtaatttatcaattgccagagaattaaatgtaaaaaccgacgatgtttatgaagcaattcaggcattgattactgaacaagtcattaaagataattttgaagagggcacaagtgttaaatcactgccccctttcttttatccattgaatgaacttataagtattgggcaaatgattaaaaatgcaggatttgaatgcggaactgaatacttaaattttgatgagcaaccagcaactatgttagatgcaaatttgttgagcgttgaagaaggatatccagtaaccattatagaacgattacgaactgccgatggagaaccggtcgtctattgtttagataaaattgctaaaaaagaattaacatgtacagagtatcaaatgagcaatggatcgatactaagtgcgataaaagaacaaagtaatcataatatttgttacgctgatacagaaattgaagcggtaaattatgaacctcgaatatccgaagtactgaatgcttcgccacacgaaggtttgattttattaaaaattacgcactacaatgaattagatgaacctattttgtattcattaaattatatgaaaaatagcttagttcaatttaaaatcactagaaaaatatagatgtaagaagatatagaggaggctatatatttgagtagacaatctcaaccaaatatacatatcaaagtttcaccaacaactaaatttaaaacaactactatagtttttaaatttatggcacctttagaatatgacacaattacagctagatcattattaagcaaattattagttcgagcaactaagaaatggccaaccgataagtcgtttaataatcacttagccgatttatatggtgcgtatgtgaatagtacaatttcaaaattcaaagatcagcatgtcattacattttcattagaaattgttaatgaacgttatttaagaaacggtgaatcattatttaatcaaggattagatttattacaagaaatcatttggaatccattaattgaaaataaagcattcaatgataattttgttaaccaagagaaaacattattagccaaaaaaatagaagcaatggtagataataaagcacaatattcgtttttaaaattactcgaccatatgtttgaaaatgaagcatataaatacttatctacaggacaactagaacaaatcccacatattactgctgaaacactatatcatacatatcaatcaatgattaataatgatcaatgttctgtttatgttgtcggcaatgtagaacctgaaagtgttgagaaacaaatacgtgaaaaatttgcacttaaaccattcgataaacatcaattccaacattctactcatcatttacacgatgaagaagttgattatattgttgaatatgatgacgtggatcaagctaaattaaatatgggataccgttttccaacacaatatggacaaagtggatatgctgcgtttgttgtatttaacatgatgtttggaggagatccttcatctgttttatttaatgaagtgcgagaaaagcaaagtttagcgtactctatacattcacaaattgatggcaaaaatggctatttatttgttttgagtggggtttcaagtgataagtacgaaactgcaaaagacactattataagtgaatttgaaaaaataaaagcaggagatttcactgaagaaaaattagagttagctaaaaaagtaatcatttctcatcgatatgaatctgaagatcgtccgaaaagtattatagagattatgcataaccaaatattattagagcaaccacaaagcaaagaaacatttataaatgatatacagaaggtaagtcgcgaagatattgtttctgttgctgaaaaagcatttttagatacaatctatgtgttgacaaaaggaggggataaataatgaaagagcgttattatgaattaatagacgaaagagtattcgaacaagaattagaaaatggtttacgattatttattatccccaaaccaggttttcaaaagacatttgtcacttacactacacaatttggttcattagataatcaattcaaaccccttggacaagaccaatttgttactgtacctgatggagttgctcactttttagaacataaattatttgaaaaagaagaagaagacttatttactgcgtttgctgaagataatgcacaagcaaatgcgtttacaagctttgatcgtacaagctacttgttcagtgcaactgataatattgaaaacaacattaaacgtttacttacaatggttgaaacgccttattttacaaaagaaactgttgataaagaaaaaggtattattgcagaagaaataaaaatgtatcaagaacaacctggatataaattaatgtttaatacattgcgtgcaatgtatcaacgacatccaatacgtgttgatattgccggtagtgtagaaagtatatacgatattacaaaagatgatttgtatctatgttatgaaacgttttatcatccatcaaatatggttttatttgttgttggtgatgtgaatccagaagaaatatgtcgaatagtaaaacaacacgaggatgctcgtaataaagttaaccaacccaaaatcgaacgaggacttgttgatgaaccggaggatgttaaagaagcatttgttactgaatctatgaaaattcaatcaccaagactaatgcttggttttaaaaataaaccattacaagaagcgcctcaaaaatatgtacaacgtgatttagaaatgtcattattctttgagttaatttttggggaagaaacagatttttatcagaatttattaaacgaaggacttatcgatgatacatttggttatcaatttgtactagagccgacgtatagtttttcaatcgtgacaagcgctactgaagaaccagataaattaaaaaaattattattagatgagttgcgtgataaaaaaggcaatttccaagatgcagaagcatttgaacttttgaaaaagcaatttataggtgaattcatatcaagtttaaactcacctgaatatattgctaatcaatatactaaattgtattttgaaggtgttagcgtgtttgacatgttagacattgttgaaaatatcacgttagatagtattaacgaaacgtcatcgttatatttaaatttagatcagcaagtcgatagtcgtttggagattaaaaagtaatgaaagcattagtattaggtggttctggttcaattggttctgagatagtcaaacaattattaactgatggatttgaagtttatgtgcaatattatcgtactgatataaatgaattaactagcaaatttaatgatgataaagttcgttttatacaagcggatttatctcaaacaattgatattgacaaaacatttggtgacattaaatcattagactgtttaatatatgcaagtggtcagtctttatatggtgttttacaagatatgaaagaccatgatattgatgcatgttatcagttaaatgtcttgcaattaattcgattatgtagatatttcgttgatgttttacgtcaaagtgccaatggaagaattattgtaatttcatcaatttggggtgagacaggagctagtatggaaactatttattcggcgatgaaaagtgcacaattaggtttcgttaaggcgcttagtcaagagcttgcactaacatcagtgacagtaaatgctatcgcacctggatttgtagccggtaatatggcaagtgagtggcaagaagatgaacttcaagcaatgataactgaattaccacaacagcgattggttttaccgagtgaggttgctcatacatgcgcctatttatatcactcaaatgctagaagcgttactggaactatacagaaagttaatggtgcttggtatatttaaaatatagaactatttttatgagcaaatgtttttatgattgatgttataatatgaatattacaatgaatcataatttgttaattaaacaaggggtgaggttcaccatgacagttgcagagaaaaaagaatggtacctagaatacgaaattgaaattaatagaccgggtcttttaggtgatgtatctagtttattaggtatgttaggtataagtattgttacaattaatggtgttgatcaaggtaaacgaggccttttaattaaaacagacaatcttgaaaaagttgaacgttttgagcaaatagctcgtggtataaatgaaattgaaataacaaagcttaaaaaaccagaattaagagaccgtcttgcagttagacatggtagatatattgagcaagatgcaaaagataagaaaacctttcgatttgagcgtgaagatttaggcttgttagtagactttttagctgaattgttcaaagaagaaggtcataagttgattggcattagaggtatgccacgggttggtaaaactgaatcaattgttgcgggaagtgtttgtgcacataagagatggttatttattagttctactttaataaaacaaactgtacgtagctctctaattaaaggggaatatgatgccaatcatgtatacattattgatggtgcagttactgccagagaatctaatccaaaacatcaagagcttgttaacgaagttatgacgttaccatcaatcaaagtcgttgaacatccagatttatttgttgaaacaagtacttgtacaatggaagattttgactatattatcgaattgagagaaaatgaaaatcaagaaatacattacgaagaaatgaagaaacagacagtccaaagtaagaataatttagattttggagatccgtttggtggtggttttggtttcttcgagtaagtgtaaggaggctatgaattgaaaacggtcggtgaagcgctaaaaggtagacgtgaaaggttaggaatgactttaacagaattagagcaacgtactggaattaaacgtgaaatgctagtgcatattgaaaataatgaattcgatcaactaccgaataaaaattacagcgaaggatttattagaaaatatgcaagcgtagtaaatattgaacctaaccaattaattcaagctcatcaagatgaaattccatcgaaccaagccgaatgggacgaagtaattacagttttcaataataataaagacttagattataagagtaaatcaaaagagccaatacaattattagtaatcatgggtattacagttttaataactttattgttatggatcatgttagttttaatattttaacagaaataaattagtgagaaatgaggatgtataatgaatattccgaaccagattacggtttttagagtagtgttaataccagtttttatattgtttgcgttagttgattttggatttggcaatgtgtcatttctaggaggatatgaaataagaattgagttattaatcagtggttttatttttatattggcttcccttagcgattttgttgatggttatttagctagaaaatggaatttagttacaaatatggggaaatttttggatccattagcggataaattattagttgcaagtgctttaattgtacttgtgcaactaggactaacaaattctgtagtagcaatcattattattgccagagaatttgccgtaactggtttacgtttactacaaattgaacaaggatttgtaagtgcagctggtcaattaggtaaaattaaaacagcagttactatggtagcaattacttggttgttattaggtgatccattggcaacattgattggtttgtcattaggacaaattttattatacattggcgttatttttactatcttatctggtattgaatacttttataaaggtagagatgtttttaaacaaaaataaatatttgtttatactagatttcattttcatatggaatctagtttttttaatcccaattttagaaattagccacgcaattgtttataatgatatattgtaaaacaatatttgttcattttttaggcaaatgtgttgtagcatctgatacattgaatctaaaattgatgtgaatttttaaatggaatacatgaaaaaagaattaaacgatacaagggggatataaatgtcaattgccattattgctgtaggctcagaactattgctaggtcaaatcgctaataccaacggacaatttctatctaaagtatttaatgaaattggacaaaatgtattagaacataaagttattggagataataaaaaacgtttagaatcaagtgtacgtcatgcgttagaaaaatatgatactgttattttaacaggtggcttaggtcctacgaaagatgacttaacgaagcatacagtggcccagattgttggtaaagatttagttattgatgagccttctttaaaatatattgaaagctattttgaggaacaaggacaagaaatgacacctaataataaacaacaggctttagtaattgaaggttcaactgtattagcaaatcatcatggcatggctccaggaatgatggtgaattttgaaaacaaacaaattattttattaccaggtccaccgaaagaaatgcaaccaatggtgaaaaatgaattgttgtcacattttataaaccataatcgaattatacattctgaactattaagatttgcgggaataggtgaatctaaagtagaaacaatattaatagatcttatcgataaacagactaatcctacgattgcgcctttggcgggaagtcatgaagtatatattagattgactgcaaatgccgactcaaaagaacaagcacaatcattgattcaacctgttaaacaagaaattcttgatcgtattggagaatattattatggttcagatgacacattaattgagcaagctgtaataaagaaaattcatgaaccttttgtaatatatgatggtattactaatggtgctttatatcatcgattgaaagaagtggatttaaacgatgttctaaagggtatgattaatcacaatgaaaactttgttgatattaataaacctattgagcagcaattaaaagatgcagtgcaatttgttaataaattgtttaatgtgtcatcagcaattattctattagagtatgatggtgtagtccatataggctatgataataactttgaatttaaaactgagcaatttaaaatgtctaaatctagaaatttattaaagaacagaagtcaaaattatgtgctcataagattattaaattggcttagaacaacaaattaattgtattatcgataaaaatataagcacgtttgttcgtttttgcgttttgatttcaagattttatacgaacaaatattcgcaaaacacttgtattttattttgaatccttgtatagtattgataagataattaaaagatagcaatttcaattaggaggtctcgctttggataacgatcgtcaaaaagctttagatacagtaattaaaaatatggagaaatctttcggtaaaggtgccgtaatgaagttgggtgacaatataggtcgccgagtttcaactacatcaactggttcagttacattagataatgcgctaggtgtaggtggctatcctaaaggacgaattattgaaatttatggtcctgaaagttctggtaagacaacagtagcgcttcacgctattgctgaagtacaaagtaatggcggggtggcagcatttatcgatgctgaacatgctttagatccagaatatgctcaagcattaggcgtagatatcgataatttatatttatcgcaaccggatcatggtgaacaaggtcttgaaatcgccgaagcatttgttagaagtggtgcagttgatattgtagttgtagactcagttgctgctttaacacctaaagctgaaattgaaggagaaatgggagacactcacgttggtttacaagctcgtttaatgtcacaagcgttacgtaaactttcaggtgctatttctaaatcaaatacaactgctattttcatcaaccaaattcgtgaaaaagttggtgttatgttcggtaatccagagactacaccaggtggacgtgcattaaaattctatagttcagtaagactagaagtacgtcgtgcagaacagcttaaacaaggacaagaaattgtaggtaatagaactaaaattaaagtcgttaaaaataaagtggcaccaccatttagagtagctgaagttgatattatgtatggacaaggtatttctaaagagggtgaacttattgatttaggtgttgaaaacgacatcgttgataaatcaggagcatggtattcttacaatggcgaacgaatgggtcaaggtaaggaaaatgttaaaatgtacttgaaagaaaatccacaaattaaagaagaaattgatcgtaaattgagagaaaaattaggtatatctgatggtgatgttgaagaaacagaagatgcaccaaagtcattatttgacgaagaatagtacacaaatttatatctatagttaaacttagcaaatatccttataggattgattgaaagtgatattcatctcataaagctagaataatatctaactttatgggatacactacaaatcgagactataaggttttttattttatttattattacattatcaatagttttataatcgagcttcaaaactttagaaaatagtagaaatagcattcaatatagtgcaaaagtgcaaattgataacttgacacttatctcctataaaccgtacaattaatttgtatgatttatatataatttcataaagtcatattgaatttcatataaagagcaaaccctagaaaaggaggtgtttgtgtgaatttattaagcctcctactcattttgctggggatcattctaggagttgttggagggtatgttgttgcccgaaatttgttgcttcaaaagcaatcacaagctagacaaactgccgaagatattgtaaatcaagcacataaagaagctgacaatatcaaaaaagagaaattacttgaggcaaaagaagaaaaccaaatcctaagagaacaaactgaagcagaactacgagaaagacgtagcgaacttcaaagacaagaaacccgacttcttcaaaaagaagaaaacttagagcgcaaatctgatctattagataaaaaagatgagattttagagcaaaaagaatcaaaaattgaagaaaaacaacaacaagtagatgcaaaagagagtagtgttcaaacgttaataatgaagcatgaacaagaattagaacgcatctccggtctcactcaagaagaagctattaatgagcaacttcaaagagtagaggaagaactgtcacaagatattgcagtacttgttaaagaaaaagaaaaagaagctaaagaaaaagttgataaaacagcaaaagaattattagctacagcagtacaaagattagcagcagatcacacaagtgaatcaacggtatcagtagttaacttacctaatgatgagatgaaaggtcgaatcattggacgagaaggacgaaacatccgcacacttgaaactttaactggcattgatttaattattgatgacacaccagaagcggttatattatctggttttgatccaataagaagagaaattgctagaacagcacttgttaacttagtatctgatggacgtattcatccaggtagaattgaagatatggtcgaaaaagctagaaaagaagtagacgatattattagagaagcaggtgaacaagctacatttgaagtgaacgcacataatatgcatcctgacttagtaaaaattgtagggcgtttaaactatcgtacgagttacggtcaaaatgtacttaaacattcaattgaagttgcgcatcttgctagtatgttagctgctgagctaggcgaagatgagacattagcgaaacgagctggacttttacatgatgttggtaaagcaattgatcatgaagtagaaggtagtcatgttgaaatcggtgtagaattagcgaaaaaatatggtgaaaatgaaacagttattaatgcaatccattctcaccatggtgatgttgaacctacatctattatatctatccttgttgctgctgcagatgcattgtctgcggctcgtccaggtgcaagaaaagaaacattagagaattatattcgtcgattagaacgtttagaaacgttatcagaaagttatgatggtgtagaaaaagcatttgcgattcaggcaggtagagaaatccgagtgattgtatctcctgaagaaattgatgatttaaaatcttatcgattggctagagatattaaaaatcagattgaagatgaattacaatatcctggtcatatcaaggtgacagttgttcgagagactagagcagtagaatatgcgaaataatttttgtctccctcacaaattagtgagggagcttttttaagttgtagtctcaatctaattagacagcactttatcggtaataactatagtaaacagtggttatttgaaagtaagacggaccttatattaaataagaagttattgcttttaataaaaatgttttaggcttcgtatttactatatttatattatgtaaacctataaagatgagtgcttttctaaccaataaaaaagaagagaagatgtaacacatcttctcttctgcaatattaattaggatttatttctaagttgagttattttaattgtaaatctgttttctttaattcttttataacttctgcagtatcataacaatttgttgcaattgttgaatatctctctgctaaacgatatgcattaatgtaaagctttaaactttctttagctatatcctctgcatcttcgaattttgatgggttagacataaccactaattctgcaaatttttctggatcaatattaatagacatgtatttatttacaactcctatttattttgatgtcttaatactaacatattgaagttttcagacaaagtaatgtctctctataattgaagaaaaataattcaaagaatttaatatttactttaaatattagaacgtatgaattaaactagtatttatgagaggatgaacaaaacatgagaataatgtttataggggatatcgtaggtaaaattggacgagacgcaattgaaacgtacatacctcaactgaagcaaaagtataaaccaacagttacaattgtaaatgctgaaaatgcagcacatggtaaaggtttgactgaaaaaatatataaacaattactaagaaatggtgtagatttcatgactatgggtaatcacacatatggtcaacgtgaaatttatgattttatagatgaagcaaaacgactagtaagaccagcgaattttccggatgaagcgccgggaattggtatgagatttatacaaattaatgatattaaacttgcagttattaatctgcaaggaagagcgtttatgccagatattgatgatccttttaaaaaggcagatcaattagtcaaggaagcacaagaacaaactccgtttatatttgttgattttcatgcagaaacaacttctgaaaagtatgcaatgggatggcatttagatggtagagctagcgctgttgttggaacgcatacacacattcaaacagcagatgaacgtattttaccaaaggggacagggtatataacggatgttggtatgacaggtttttatgacggcattttaggaataaataaaacagaggtaattgagcgttttatcactagtttgccacaaagacatgttgttccaaatgaaggtagaagtgtattatctggtgttgttattgatttagacaaagaaggtaaaacaaagcacatcgaacgtatattgataaatgatgaccatccattttcaacattttaaaattacgtaagtaaacattcgaattggaccctatcatccattagtatgaatttaatatagtaccactgtttacatagtaaatcggtggttctttttgttatcatttaatatgaaatatatccataggaggcatataactatgaaaccacaattatcgtggaaagttggcggtcaacaaggcgaaggtattgaatcaactggggaaatcttcgctacggctatgaatagaaaaggatattatttatatggatatagacatttttcaagtcgtatcaaaggtggacatacgaataataaaattagagtttctacgacgcctgttcatgcaattagtgatgatttagatattttgattgcatttgaccaagaaacaattgatgttaaccatcatgaaatgagagaagacagtattattttagctgatgccaaggctaaacctgtgaaaccagaaggatgtcatgcacagcttattgaattaccttttacagcaaccgctaaagaattaggtacagcattaatgaaaaacatggttgcaataggtgctactagcgcattgatgaatttgaatacaaatacatttgaagaacttattactaatatgttttctaaaaaaggtgacaaggtagttgaagtcaatatccaagcattaaacgaaggttatcaattaatgcaatcccgcttacctgaaatcgacggggactttgaattagagtcaacagatgcactaccacatctatatatgattggtaacgatgccattggattaggtgcaattgctgcaggttcacaatttatggcggcatatcctattacacctgcgtctgaagttatggaatatatgattgccaatatatctaaagtaaacggagcggttattcaaacagaagatgaaattgctgctgtaactatggctattggtgcaaattatggtggagtcagagcgtttacggctagtgctggtccaggtttatctttaatgatggaagcaattggattatctggtatgactgaaacgccattagtcattattaatactcaacgaggtggaccttctactggattacctacgaaacaagaacagtcagatttaatgcaaatgatttatggtacacatggtgatattccaaaaatagttgtagcaccaactgatgcagaagatgcattttatttaactatggaagcctttaatttagcagaacaatatcaatgccctgttatagttttaagtgatttgcaattatctttaggtaaacaaactgttgaaaaattagattataatcgcattgaaattaaacgtggtgaaatcattcaatctgatattgaacgtgaagaagatgataaaggttatttcaagcgttatgcgttaacatccaatggtgtttctcctagacctatccccggtgttaaaggaggtattcatcatataactggtgtggaacacaatgaagaaggtaaacctagtgaatctgcgtcaaatagacaacaacaaatggaaaaacgaatgcgtaaaattgagcagttactaattgaatcgccagtagaagctaacttacaacatgaggatgcagatattctttatatcggttttatttctacaaaaggtgcaattcaagaaggtagtaaccgtttgaatcaacaaggcataaaagttaacactatacaaattagacaattgcatccattcccaacaagcgttattcaagatgcagttaataaagcgaagaaagtcgttgtagtggagcacaattatcaaggacaattggctagtattataaaaatgaatgtcaatattcatgataagattgaaaattatacaaagtatgatgggacacctttcctaccacatgaaatcgaagaaaaaggcaaaataattgctactgaaataaaggagatggtatagatggcgacatttaaagattttagaaataatgttaagcctaactggtgccccggatgtggcgatttctcagtacaagctgcaattcaaaaagcagccgcaaatatagggttagaacctgaagaagtagctatcatcaccggtataggatgttctggccgtctttcaggatatattaattcttatggcgttcattctattcacggacgtgcattacctttagctcaaggtgtaaaaatggcgaataaagatttaactgttattgcatcgggaggagatggtgatggttatgctataggtatggggcatacaatccatgctttaagaagaaatatgaacatgacgtatatagtcatggataatcaaatttatggtttgacaaagggacaaacatcgccgtcatcagcagtaggatttgttactaaaacaacgccaaaaggtaatatagaaaaaaatgttgcgcctttagaattagcattatcatctggtgccacatttgtagcccaaggtttttcaagcgatattaaaggattaacaaaactaattgaagatgcaattaatcatgatggattttcattcgttaatgtcttttcaccatgtgtgacttataataaaattaacacatacgattggtttaaagaacatttaacaagtgttgatgacattgaaaattatgattctacagataaacaattagcgactaaaactgttattgaacatgaatctttagtaactggtattgtttatcaagataaagaaacaccatcatatgaatctcaaattaaagagttagatgatacaccacttgctaaaagagatatcaaaattactgaagacaccttcaatgcattaactgaacaatttatttaataattaaaactgagtcgtataaatgtatttataacagatccatttatgctactcagttttttactattacaaaaaataaaggagtttttaaaaatgaaagacacattaatgagtatacaaataattcctaaaacaccaaacaatgacaatgttataccttacgtagacgaggcgattaaaataattgacgaatctggtttgcattttagagtaggtccgttagaaacgacagtacaaggaaatatgaatgaatgtttaattttaatacaatcattaaatgaacgaatggtggaacttgaatgtccaagtattattagccaagttaagttttatcatgtgccagatggcatcactattgaaactttaactgaaaaatatgatgaataacattaaaagtgaagtaaactggatttgaattggcttgttagagatgacgtataactttaactgtttttgcactttatagttaaatttaatataattattaaatgatacgggcaaatagaaaggattttgtaaagtgaacgaagaacaaagaaaagcaagttctgtagatgttttagctgagagagataagaaagcagaaaaagattatagtaaatattttgaacatgtttatcagccgcctaatttaaaagaagcgaaaaaaagaggtaaacaagaagttcgttataatagagatttccaaattgatgaaaaatatcgcggtatggggaacgagcgtacatttttaattaaaacatatggatgtcaaatgaatgcacatgacactgaggtcattgctggtatacttgaagcattaggctatcaagcaacgactgatattaacactgcagatgttattttaattaatacatgtgcgattagagaaaatgccgagaacaaagtgtttagtgaaataggtaatttgaagcatttgaaaaaagaacgacctgatattttaatcggtgtttgtggttgtatgtcacaagaagagtcagtagtgaataaaattttaaaatcgtatcaaaatgtagatatgatatttggtacacataatattcatcatttaccagaaattttagaagaagcatacttatctaaagcaatggttgttgaagtatggtctaaagaaggagacgttattgaaaatcttccaaaagtccgtgaaggcaacattaaagcatgggtcaatattatgtatggttgtgataagttttgtacatattgtattgttccatttacaagaggtaaagaacgaagccgtagacctgaagacattatagatgaagtacgtgaacttgctcgtgaaggttacaaagaaataacgcttttaggtcaaaatgtaaattcttatggtaaagatttacaggatatagaatatgacttaggagatcttttacaagcaatttctaaaatagcgattccaagagttcgtttcacaacaagtcatccttgggactttacagatcacatgattgatgttatttcagagggtggtaatatcgttcctcatatccacttgccagttcaatctggaaataatgcagtattaaaaataatgggtagaaaatatacacgagaaagttatttggatttagtaaaacgaatcaaagatagaattcctaatgtagcattaactacagatattattgtagggtatccaaatgaatcagaggaacaatttgaagaaactttaactctgtatgatgaagttggttttgaacatgcatatacgtacttgtattcacaacgtgatggtacgcctgctgctaaaatgaaagataatgtacctttaaatgtcaaaaaggaacgattgcaacgtttgaataaaaaagttggtcattattcacaaatagctatgagtaagtacgaaggacaaactgtaacagtactttgtgaaggtagtagtaaaaaagatgatcaggttcttgctggctacactgataaaaataagctagttaatttcaaagcacctaaagaaatgattggtaaactagtggaagtacgaatagatgaagctaaacagtattcattaaatggcagttttgtaaaggaagtagagccggaaatggtgattcaataaatgtataataaagatgacgtgttgaaacaagcggataatattgcaaataaaattaaaaatttggatactatcaaaacatatcaacaaattgaagcacagattcatcagaaccaaacgataaagactaaaatggatatgttaaaaaagcatcaaaaacaagcagtaaactttcaaaattacgggaaacaaaatgcgctagaacagtcggaacataccattcaaagtatagaagcagaaataaatacattgcccatagttgaacagtttcaaacttcacaatatgaagcgaatcaattattgaaaatgtttgtatcaacaatggaaacacgtttaaatgaccataataaagccaagcatagtgattaattacaaacaaaaaggagaacaatcatatgaaatcaagaaaactggctataactgcacttttaattgcaataaatgttgtattaagcagtattatcatcattcctctaggaccagttaaggcagcaccagtacagcattttgtaaatgtattaagtgcggtcatagtaggtccttggtatggattagctcaagcgcttatatcatcaattttaagagttctttttggtactggtacagcttttgcatttccaggtagtatgattggagttttattggctagtatgttttacatatatcgtaaacatatattcatggccgcggtcggtgaagtacttggaactggtgtcatcggaagtttaatttgtataccattagcatatttccttgggcttcaagacttcttcattaaaccgctaatgattacgttcatagtctcaagtgctatcggatctattataagttatttcttattaattactctaaaaaaacgtggtattcttcaaaggtttataaaataattttatgatatatgatttcaaacagagtcattgttcattttaatattgaacgcccttacttaattaaatgtcttgaatgttagaattttaatttaattctaaacatgctattgacacattttattaggtttgaggcgttttcttatacatttaagatgcttcgtgattatatggtatgaataggtttgtaaaagtaagtatgttaaaatgtataagttaaataattaataattagaaagcttacaaacgaatatattgtaaagacaaattttaaaaagagacaagggttgtgaagaaataatatgtctaatgttacaccaatgatgcagcaatatttaaaaataaaatcagaataccaagattgcttattattttttagactaggtgatttctatgaaatgttttatgaagatgccaaggaggcatcacgtgtacttgaaattactttaactaaaagagatgctaaaaaagaaaatccaattccgatgtgtggtgttccgtatcattctgcagatagttatatagatacacttgttaataatggatataaagtagctatttgtgaacagatggaagatccgaaacaaacgaaaggtatggttagacgtgaggtagtaagaattgtgactccaggaactgtgatggagcaaggtggtgtagatgataaacaaaataactatattttaagttttgttatgaatcaacctgaaattgcgcttagttactgtgatgtttctactggcgaattaaaggttacacattttaatgatgaagcgactttattaaatgaaattacgacgataaaccctaacgaagttgttatcaatgacaatatttccgataatttaaaaagacaaattaatatggtgacagaaacaataacagtcagggaaacgttatcatcagaaatctatagtgtgaatcaaactgaacataaattaatgtatcaagcgacacaattattgctagattatattcatcatacacaaaaacgtgatttatcgcatatcgaggatgttgttcaatatgcagctatagattatatgaaaatggatttttatgctaagagaaaccttgagttaacggaaagcattcgattaaaatcaaaaaaaggaacgctactttggctaatggacgaaacgaaaacaccaatgggagcacgccgcttaaaacaatggatagatagaccactaataagtaaagaacaaattgaagcacgattagatatcgttgatgaatttagtgctcatttcatagaaagagacaccttaagaacatatcttaatcaagtgtatgatattgaacgtcttgttgggcgtgttagttacggaaatgttaatgcgagagatttaattcaacttaaacattccatttctgaaataccgaatattaaagcattactaaattctatgaatcagaatacgcttgtacaagttaatcaactagaaccccttgatgatttacttgatatattagaacagagtttagtagaagaaccaccaatttcagttaaagatggcggactattcaaagttggttttaatacgcaattagatgaatatcttgaagcttcaaaaaacggaaaaacatggttagcagaattacaagccaaagaaagacaacgtacaggaataaaatcattgaaaataagctttaataaagtgtttggttattttatagaaataacacgtgccaacttgcaaaattttgaaccaagtgaatttggttatatgaggaagcaaacgttatcgaatgctgaacgttttataactgatgaacttaaagaaaaagaagatatcattttaggtgcggaagacaaagccatcgaattagaatatcaattatttgttcagctacgtgaagaagttaaaaaatatactgaacgtttacaacaacaagctaaaattatttcagagctagattgtttacagagctttgcagaaattgctcaaaaatataattacactaggccttcatttagtgaaaataaaacattagaattagtggaatctaggcacccagtagtggaaagagtaatggattataatgactatgtgcctaataattgtcgattagataatgaaacatttatatatttaattacaggtccgaatatgtctggtaaatcgacatatatgagacaagttgccataattagtataatggcccaaatgggagcttatgtcccttgtaaagaggcagtgttacctatatttgatcaaatattcactagaataggtgcggcagatgatttggtttcaggtaagagtacgtttatggtagaaatgctagaagcacaaaaggcattaacttatgcaacagaggatagtttgattattttcgatgaaattggacgtggtacttcaacgtatgacggtttagctttagcgcaggcaatgatagagtatgtagctgaaacatcgcatgctaaaacgttattttcaacacattatcatgaattgacaacattagatcaagcattaccaagtctaaaaaatgttcacgtcgctgctaatgaatataaaggtgaacttatattcttgcataaagtcaaagatggtgcagttgacgatagttatggtattcaagttgcgaaattagctgatttacctgaaaaagttattagcagagcacaagtgatcctaagcgagtttgaagcgtctgctggtaaaaaatcatcgatatcaaatttaaaaatggtcgaaaatgaacctgaaattaatcaagaaaatttaaacttaagtgttgaagaaacaactgatactttatctcaaaaagactttgaacaagcatcatttgatttgtttgaaaatgatcaagaaagcgagattgaactacaaattaaaaatttgaatttatctaatatgacaccaattgaggcattggtgaagttaagtgaattacaaaatcaattaaaatagaggtgttgcaaaatggggaaaattaaagaactccaaacctcattagcaaataaaatcgcagcaggtgaagtagttgaaagaccgagttctgttgtgaaagaactgttggaaaatgctatagatgcaggcgctacagaaataagcattgaagtagaggaatctggcgtccaatctattcgcgtagtcgataatggaagcggaattgaagcggaagacttaggattagtatttcatagacatgcgactagtaaattagatcaagatgaagatttatttcatattaggacattaggattccgtggtgaagcactagccagtatttcatcagttgctaaagtaacattgaagacttgcacggataatgctaatggaaatgaaatatatgtagaaaatggtgaaatattaaatcataagcctgcaaaagcgaaaaaaggaacagatatacttgtagaatcattattttataatacaccagcacgtttaaaatatattaaaagtttatacactgaactaggtaaaataacagatattgtcaatagaatggctatgagccatccggacattcgaatagcactcatttcagatggcaaaacaatgttaagtacaaatggttcaggacgaactaatgaagtgatggcagagatttatgggatgaaagttgcacgagatttagtacatatatctggagatacaagtgattatcacattgaaggttttgttgcaaagcctgaacattctagaagtaataagcactatatttctatttttattaatggacgatacattaaaaactttatgctaaataaagcgattttagaaggctatcatacactcttaacaataggtaggttcccgatttgttatattaatattgaaatggatccaatcttagtagacgtaaatgttcatccaacaaaactagaagtgcgtttatcaaaagaagagcaactatatcaattgatagtgagcaaaatacaagaagcatttaaagaccgtatattaattcctaaaaataacttggattatgtgccaaaaaaaaataaagtattatattcattcgaacaacaaaaaatcgaatttgaacaaagacaaaacacagagaataaccaagagaagacgttttcatctgaagaaagtaacagtaagtcatttatggcagaaaatcaaaacgatgagatagttataaaagaagattcatataatccattcgtaacgaaaacatctgaaagtttaataactgatgatgaatcttctggttataataatacacgtgaaaaagatgaagactacttcaaaaaacaacaagaaattttacaagaaatggatcaaacatttgattcaaatgaggatgcatctgtgcaaaattatgagaataaagcgtctgatgattattatgatgtaaacgatattaaaggaacaaaaagtaaagaccctaaacgaagaattccatatatggaaattgttggccaagtacatgggacgtatattattgctcaaaatgaatttggcatgtacatgattgaccagcatgcagctcaagaaagaataaaatatgaatattttcgagataaaataggtgaagttaccaatgaagtacaagatttattaatcccgttaacatttcatttttcaaaggatgaacaattagttattgatcaatataaaaatgagcttcaacaagtaggtatcatgttagaacattttggtggtcatgattatattgtaagtagctatccagtttggttccctaaagatgaagtagaagaaatcattaaagatatgattgagctaattttggaagagaaaaaagtagatattaaaaaattacgtgaagatgtagcaatcatgatgtcatgtaaaaaatctattaaagcgaatcattatttacaaaaacatgaaatgtctgatttaattgatcaattaagagaagcggaagatccatttacatgtccacatggtcgtccaataatcattaatttttcaaaatacgaattagaaaaattatttaagcgtgtgatgtagagaggatgaatcaagtgaataacaacatattgcctgctataagaaacattaaagatttagagaaactgattaaaacagattataaaatgtgtgtgcttctagatatgcatataggacatataaaaagtattatggaattgctgaagcaaaatcatatagagtgttttattcatatagatttgataaaaggtttaagccacgatgaatttgcaagtgaatttattattcagcaatacaagccaaaaggtatcgtatcgactaaatctaaagtaataaaaaaagctaaatcattaaatactttaacgatttttagagtatttattattgatagtcaagcattgaaacgcagtatagatttgataaaaaaagtggaacctgattttgttgaagtacttccaggtgttgcgagtaaagcgattcatcatattcagaaagaaacaaacacacaagtcattgcaggtggcctaattaatacaatagatgaagtcaatgaagctgttaaaaatggagcgaaatatgtaacaactagttatgataaactttggtaaatcataagtctgcaaaaatttcatttttcacgagatttagtcatataacataataaaaaagccgttttcatatgggatatgtaataaggtatttaaggtatcatacaaagaataattaaataacataattagcacctctaaaacgattaaaatcattaaagttttagaggtgtttattagtaaaaaatgcaactagtcataaaaaatatggctgaagaatgtcaattaaacaaaatggcgtcataaataaattagtgcggattgatatttctagttttcaaattaaactacttttataaagacttgaaaaattaaatttgacaaaatttttacaaaaaccattgacaacgctttcatatcgatagtatcataacaaatataataaaagttaatacatagaatagagacgggagatttctacgagccaaactgctagtgtaggaatctctttgtctttttgggaggacatttaatatgaatgtatatttagcagaattcctaggaactgcaatcttaatcctttttggtggtggcgtttgtgccaatgtcaatttaaagagaagtgctgcgaatggtgctgattggattgtcatcacagctggatggggattagcggttacaatgggtgtgtttgctgtcggtcaattctcaggtgcacatttaaacccagcggtgtctttagctcttgcattagacggaagttttgattggtcattagttcctggttatattgttgctcaaatgttaggtgcaattgtcggagcaacaattgtatggttaatgtacttgccacattggaaagcgacagaagaagctggcgcgaaattaggtgttttctctacagcaccggctattaagaattactttgccaactttttaagtgagattatcggaacaatggcattaactttaggtattttatttatcggtgtaaacaaaattgccgatggtttaaatcctttaattgtcggagcattaattgttgcaatcggattaagtttaggcggtgctactggttatgcaatcaacccagcacgtgatttaggtccgagaattgcacatgcgattttaccaatagctggtaaaggtggttcaaattggtcatatgcaatcgttcctatcttaggaccaattgccggtggtttattaggtgcagtggtatacgctgtattttataaacatacatttaatattggttgtgcaattgcaattgttgtagttattattactttgattttaggttacattttaaataaatcatcaaaaaaaggtgatatcgaatcaatttactaaaataaaaagaaacgtaaatagcataatttaacatgtttgattcatggattatgctattttttcgccaaaatttaacagattttgtacaatgggttagcgattattttttaataaaggagatactactaatggaaaaatatattttatctatagaccaaggaacaacaagctcaagagcgattttattcaatcaaaaaggggaaattgcaggggtagcacaacgtgagtttaagcaatattttccacaatcaggttgggttgaacatgatgcaaatgaaatttggacatctgtgttagctgtaatgacggaagtaattaatgaaaatgatgttagagctgatcaaattgcaggaatcggtattacaaaccaacgtgaaacaacggttgtttgggacaaacatactggccgcccaatttatcacgcaattgtttggcaatcacgtcaaacacaatcaatttgttcagaattaaaacaacaaggatatgaacaaacatttagagataagacaggattacttttagatccgtattttgcaggtacaaaagttaaatggattctagacaatgttgaaggtgcacgagaaaaagcagaaaatggcgatctattatttggaacgattgatacttggttagtatggaaattatcaggaaaagctgcgcatattactgattattcaaatgcgagtcgtacattaatgtttaatatccatgatttagaatgggacgatgagttattagaactacttacagtacctaaaaatatgttgccagaagttaaaccttcaagtgaaatatatggtaagacaattgattaccacttctatggtcaagaagtaccaatcgctggtgtagctggtgatcaacaagcagcattatttggacaagcttgcttcgaatgtggtgacgtgaaaaacacatatggaactggtggcttcatgttaatgaatacaggtgacaaagcggttaaatctgaaagtggtttattaacaacaattgcttatggtattgatggaaaagtaaattatgcgcttgaaggttccatctttgtttcgggttcagcaatccaatggttacgtgatggattaagaatgattaattcagcaccacaatcagaaagttatgcgacacgagttgactctactgagggtgtttatgttgttccagcttttgtaggtttaggaacaccatattgggattctgaagcacgtggtgcgattttcggtttaacacgtggaactgaaaaagagcactttatccgtgcaactttagaatcattatgttaccaaactcgtgacgttatggaagcaatgtcaaaagactctggtattgatgtccaaagtttacgtgtcgatggtggtgcagttaaaaataactttattatgcagttccaagcagacattgttaatacttctgttgaaagacctgaaattcaagaaactacagctttaggtgctgcatttttagcaggtttagcagttggattctgggagagtaaagatgatatcgctaaaaactggaaattagaagaaaaattcgatccgaaaatggatgaaggcgaaagagaaaaattatatagaggttggaaaaaagctgttgaagcaacacaagtttttaaaacagaataaacttgtagattagacttttgtataaacattgtgatacaatcaatttaagttaatatttgaatcgagaaacgagagatttgttcgaacatgtacaattgaaggattgtttatgtgggacaagtctctcgtttttacattttttaggaggcgttttggaatggcattgtctacttttaagagagaacatattaaaaagaatttaagaaatgatgaatatgatttagtaattattggtggcggtattacaggtgcaggtattgcactagacgcgagtgaaagaggaatgaaagttgcattagttgaaatgcaagactttgcacaaggaacaagctcaagatctacaaaattagtccatggtggtttacgttacttaaaacaattccaaattggagtagttgccgaaactggtaaagaacgtgcgattgtttatgaaaatgggcctcatgttacgactccagagtggatgcttttaccaatgcataaaggtggaacatttggtaaattctcaacatcaattggtttaggaatgtatgatcgtttagcaggtgttaagaagtctgaacgtaaaaaaatgttatctaaaaaagaaactttagctaaagaaccattagttaaaaaagaaggtctaaaaggcggcggttactatgttgaatatcgtactgacgatgcgcgtttaactattgaagttatgaagcgtgctgctgaaaaaggcgcagaaattatcaactatactaaatctgaacacttcacttatgataaaaatcaacaagtaaatggtgttaaagttatagataaattaactaatgaaaattatacaattaaggctaaaaaagtggttaatgcagcaggcccatgggttgatgatgttagaagtggtgattatgcacgcaataataaaaaattacgtttaactaaaggtgtacatgttgttattgatcaatcaaaattcccattaggtcaagcagtatactttgatactgaaaaagatggaagaatgatttttgcaattccacgtgaaggaaaagcgtatgtaggtactacagatacattctatgacaatatcaaatcttcaccattaactacacaagaagacagagactatttaatcgatgcgattaattacatgttccctagtgttaatgttacagatgaagatattgaatcaacatgggcaggaattagaccattaatttacgaagaaggcaaagacccttctgaaatctctcgtaaggatgaaatttgggaaggtaaatcaggtttattaactattgcaggtggtaaattaacaggctatcgtcacatggctcaagacattgttgatttagtatctaaacgcttgaaaaaagactacggtttaacatttagtccatgtaatacaaaaggtctggcaatttcaggtggcgatgtaggtggtagcaagaactttgatgcgtttgtagagcaaaaagtagatgtagctaaaggattcggcattgatgaagatgttgcaagacgtttagcatctaaatatggttcaaatgttgatgaattgttcaacattgcgcaaacatctcaataccatgatagcaagttaccattagaaatttatgtagaacttgtttatagtattcaacaagaaatggtatacaaacctaacgatttcttagttcgtcgttctggtaaaatgtatttcaatattaaagatgtattagattataaagatgctgtcatcgatattatggcagatatgcttgattactctccagctcaaattgaagcatatactgaagaagttgagcaagcaattaaagaagcgcaacatggaaataatcaaccagcagttaaagaataattaatttgtacaatcataaactggtgtcctgttttaagggcatcagtttttttatacgagatacattagtcaattgaaactatgcatcactaaatgtatgataataataaaagcgaatataaaaacgttgttattaaaggtgtgagatgatgactgaaaaacaatttaaattaactgtacaagataatacgaatattgaagttaaagtgaattttacagatgtagattcaaaaggaattattcatatatttcatggtatggctgaacatatggaacgttacgataaattagcacatgcactttcaaagcatggcttcgatgtgatacgtcataatcatcgaggacatggtattaatattgatgaatcaacaagagggcattacgatgatatgaaacgagttatcggtgatgcctttgaagtagcgcaaacagtgagaggcaatgttgataaaccatacattataatcggacattcaatgggatccgttatagctagattgtttgtagaaacatatccgcaatatgttgatggtctaattttaagtggtactggtatgtattcattatggaaaggtttaccaaccgttaaagtgttacaactgattacaaaaatttatggtgctgagaaacgagttgaatgggttaaccagttagtatcaaatagttttaataaaaaaatacgtccattacgtacacaaagtgattggatttctagtaatccaattgaagtagataactttattaaagatccatatagtggatttaatgtgtcaaatcaattattatatcaaacagcctattatatgctacatacatcacaattaaaaaatatgaaaatgttaaatcatgccatgcctatattattagtttcaggatatgacgattctttaggtgattatggtaaagggattttaaaattggcgaatatatatagaaaagctggcattaaaaatgttaaagtgaatctttatcatcataaacgtcatgaagtgttatttgaaaaagatcatgacaaaatttgggaagacttgtttaaatggttgaatcaattttataaaaaataaagaaagtggaattaaatatgaataaaaataagccttttattgtagtaattgtggggccaactgcttcaggtaaaacagagcttagcatagaactcgcgaagcgtatcaatggtgaaatcataagcggtgattctatgcaagtttacaaacatatgaatattggaactgcaaaagtaacacctgaagaaatggatggtattccacatcatttaattgatatcttgaatcctgatgatacattttcagcatatgaattcaagcgattagcagaagatttaattactgatataacgaatagaggtaaagttccaatcatagcaggtggaacaggcttatatattcaatcattaatatataattatgaattagaagatgaaacagttacacctgcacaattatccatagttaaacaaaagttatctgcattagaacatttagataatcagcaactacacgattatttagctcaatttgatgcggtttctgcagaaaatattcaccctaacaaccgccaaagagtgttgcgcgctattgaatattatttaaaaacaaaaaaacttttgagtaatcgcaagaaagtgcaacaatttactgaaaattatgatacattattattagggattgaaatgtcgcgtaaaacattatattcaagaataaataaacgtgttgatattatgttggatcacggattatttagagaagtgcaacaacttgttgaacaaggctatgaatcttgccaaagtatgcaagctattggatataaagaattaatacctgtgattaacggacaaatgatttatgaagatgctgtcaatgatttaaagcaacattcacgccaatatgcaaaacgacaaatgacatggttcaagaataaaatgagtgttcattggttagataaagaaaatatgtcacttcaaatgatgttagatgagattacaacccagattaagtaaaaggagtccgacagatgattgcaaacgaaaacatccaagacaaagcactagagaattttaaagcaaaccaaactgaagtaactgtattctttctaaacggtttccaaatgaaaggtgttattgaagaatacgacaagtatgtcgtaagcttaaattctcaaggcaaacaacacttgatttacaaacatgcgatcagcacttatacagtagaaactgaaggtcaagcatctactgaaagtgaagaataagttgtaatcatatgggcacgatttaatgactcgtgtacataacgtttgaagtatgataaatagatatagaaataaagtcatatgtgacatcaattaaatgatgttcaaatgacaagatacaatagaggaatgtttgtaataaaaacgcttcatataaaggtcgagtcaatatatgatacgactttatatgaagcgttttatttgctatgagctagtatattttataataatttttctatttctctttcgatttgaacaggttttttttgaggtgcaaatcgtttaacaacgttaccttcgcgatccactaaaaacttagtgaaattccatttgattttctcattaaagaatccgtgttgtgccgcagtcaaatatctaaataaaggtaattgatgttccccttttacgtctattttttgatgcatagggaaggtaacaccatagtttaatttacagttttgagctgcttcttcgcctgatccaggttcttgaccaccaaattgattacaagggaaacctagaattacaaacccttgatctttgtatttctcgtataatgattgcaaaccttcaaattgtgaagtaaagccacattcgctagctgtattaacaattagcataacgtcacccttatatgcatctaatttgtaagtaacacctttatttgtttctactacaaaatcataaattgtctccattgaatcatcctttcgatttacttaaaatgtaccataaaatcgtgtaatagtctttactaaaactctatgatagaatactttgagtaggattttattaaggagatgtataacatggctcagcaacaaattcatgatactaaaaataaactagaaaaagctgtcttagtcggtgtacatgctcaagatgataagcaatttaattttgagtctacaatggaggaattatcatctttatcagagacttgccaacttgaagtgttgggtcaaattactcaaaacagagatcgtgtagatcgcaaatattatgttggtaaaggtaaaattgaagaaattcaagcatttattgagttcaaagatattgatgtagtcatcacaaatgatgaattaacgactgcacaatccaaatcactaaatgaagctttatgtgtaaaaattattgatagaactcagttgattcttgaaatatttgcattaagagcaagaagtaaagaaggtaaattgcaagtagagctagcacaacttgattatttattacctagattgcaaggccatggtaaaagtctttctcgtttaggtggcggtattggaactagaggccctggtgaaacgaagttagagatggatcgcagacatattcgaactcgtatgaatgaaattaaacatcaattgcggacggtagaagaacatcgcgaaagatatcgaaataaaagaaatcaaaatcaggtgtttcaagtagctttagttggttatacaaatgctggtaaatcatcatggtttaatgttttagcaaatgaagagacgtatgaaaaagatcaattatttgcaacgttagatcctaaaacacgacaaattcaaataaatgatggatttaatttaattatttcagatactgttggttttatacagaaactacctacgacgttaattgcagcttttaaatcaactttagaagaggctaaaggtgcagatttattagtacatgtcgtagatagtagccatcctgaataccgtacgcagtatgacacagttaatgatttaatcaaacaattagatatgagtcatatttctcaaatagttatttttaataaaaaggacttatgtgatcatgcatcaaatcgtccagcaagtgatttgcctaatgtttttgtttcttctaaaaatgatggtgataaattacttgttaagacgttatttattgatgaaatcaaaaggcaattaacttattatgatgagacaattgcgacgaataatgcagatcgattatattttctaaaacaacatacattagtgactgaacttaaatatgatgaaattgaaaatgtttatcgtataaaaggatttaaaaaataataaaaggacgaaattcaaatgaaagatataagtaagatagtagctgacgtcgaatcaacgttagcaccatattttaaagaaattgaagaaacagcatatattaatcaagaaaaagtattaaatgcatttcatcatgtcaaagcaaccgaaagtgatctacaaggatcaacaggatacgggtatgatgactttggacgtgatcatttagaagaaatatatgcgcaggcatttaaagcagaagatgcaattgttcgtccgcaaattatttcaggtacgcatgcgattactattgcattacaaagtttattaaaacatggtgatgaattaatttatataacgggtagtccatatgacactttacttgaagtcattggcgtaaacggaaatggtattgaaagtttaatggagcacggcgtatcgtataaagatattgcacttaaagaaggtaagatcgatattgaaagtgtgttagatggggtttctgagcgcaccaaagtaatagcgattcaacgttcgaaaggctatgatcaaagaccttcaattccgctagatgaaattgaaaaggtaattactaggttgaaaaacgtgcatcctaatattttaatatttgtggataactgttatggggaatttgttgaaagacgtgaacctatagaatgtggtgccgatttaatagcaggatcattaattaaaaaccctggcggtggtttagctaagattggtggatacattgctggtagaaaagatttaattgaacgatgtggttatagattgacagcacctggtattggtaaagaagcgggtgcatcattaaatgcattgcttgaaatgtatcaaggtttctttttagcaccacacgttgtcagtcagagtcttaaaggtgcattgtttactagtttatttttagaaaaaatgaatatgaacacaacgccgaagtactacgaaaaacgaactgatttaattcaaacagttaaatttgaaacgaaagaacaaatgatttcattttgtcaaagtattcaacacgcatccccaattaatgcacattttagtccagaacctagttatatgcctggttacgaagatgatgttattatggcagctggtacgtttattcaaggttcatcgattgaattatctgcagatggacctattcgtcctccttatgaagcatatgttcaaggaggattaacatatgaacacgttaaaattgctgtgacaagagctgttaatcagttgaaagaacaaggacttatataatagattaaatttcaccctaaatgataatgtgtcttgggtgaaattttttgcggagatttatcagattatttttaaaaattgaaaaaatattttagctgtagattgttttatgtcgttttagaagtcgaaatcgcagttatatcaatgttttaagctttatgttagaaaacctgacatatttttgaaatcctaaaaaaattatgataagttattaacaagttcaaaagtagaggagaggaacaatgatatcgaatgatgcaatcagacgaaatatggctgtcttctctatgagtgtagtaagtaagttaacggatttaacgccaaggcaaatacgttactatgaaacacatgaactcatcaaacctgaaagaacagaaggtcaaaaacgtctgttctcactcaatgatttggaaagattactagaaattaaatcattattagaaaaaggatttaatatcaaagggattaaacaaatcatttatgactcacaagagcatttaacaacagatgaacaagagataagaaaaaagatgattgtagatgccacgcaaaagcctattggagaaactttgccaataaatcgtggtgatttatcccgatttattaaataaaatttggaggattttaaaatgccaaaacgtactttcactaaagaagacattcgtaaatttgcagaagaggaaaatgtaagatatttaagattacaattcactgatattttaggaacaattaaaaatgttgaagtgcctgtaagccaattagaaaaagtacttgataacgaaatgatgtttgacggttcttctatcgaaggtttcgtacgtatcgaagaatcagatatgtacttacatccagatttagatacttgggtaatcttcccatggactgctggacaaggtaaagttgcacgtttaatttgtgatgtatataaaacagatggaacaccatttgaaggggatcctcgtgcaaacttaaaacgtgtattaaaagaaatggaagatttaggcttcacagactttaacctagggcctgaaccagaattcttcttgtttaagttggatgaaaaaggggaaccaactttagaacttaatgatgatggtggatatttcgatttagcacctacagatttaggtgaaaactgtcgtcgtgatattgttttagaattagaggatatgggcttcgatattgaagctagtcaccatgaagttgcccctggtcaacatgaaattgactttaaatatgcagatgctgttacagcatgtgataatatccaaacatttaaattggttgttaaaacaatcgcacgtaaacataatttacacgcaacatttatgcctaaaccattattcggtgtgaatggtagcggtatgcactttaacgtttcattattcaaaggtaaagaaaatgcattctttgatccaaatactgaaatgggcttaacggaaactgcatatcaatttacagcaggtgtgcttaaaaatgcacgcggatttactgctgtatgtaacccgttagtaaactcatataaacgtttagtacctggttatgaagcaccatgttatattgcatggagtggtaaaaaccgttcaccattaatccgtgtaccatcttcaagaggattatctactcgtatcgaagtacgttcagtagatccagctgcaaacccatacatggcgttagctgcaatcttagaagctggactagatggtattaaaaataaattaaaagttccagaaccagttaaccaaaatatttacgaaatgaaccgtgaagaacgtgaagcagtaggcattcaagacttaccttcaacactttatactgcattaaaagcaatgcgtgaaaatgaagttattaaaaaagctttaggaaatcatatctataatcaatttattaattcaaaatcaattgaatgggattactacagaactcaagtatctgaatgggaaagagatcagtacatgaagcaatattaatacgctaaacaatgatgggaaatcagtaatatcaagggctagagcgttttgctttagctcttttttgatttggaaagatgggatttcacttgaccacttttgttaaaaaatggatttggtcaagttttggtcaagtaaatgttttatgtatttatttttttaaagctggggaagaccattttatattttagttcacatgaattttaatatatttggaggtgatgagatgaggcgataaaagaacgtcgcgaaaacgttgagtattacttgaaaatagccatattcatattacttctcatcgaattcatttgcagaacgttctaaggtaagaccccgaaaagagggaccttactacgcattattaagggggtaatactatatgaaaagagaaacaaaacaaaaaatatctttttgtttatcgatcggtattttcattttagttatactactattgatattctaaaaaattaaaaatttcgcctcatctaatttatgaattgctatgatgaaatattcaatacaatcaaaaaattgatagaaaacaaagagatatcaagttatcaaattaataaatatactgggataagttacggtaatattaatgctatgcgccgtggggaaagaagaatagaaaatttaagcttaaagaatgcaaagatcttatatgaatatgcgaaaaaggtattgtaatataagcattgagttcaataggcatacaataactgcccaaactagtgactgagtgggtgtttttatagtattaaaagttttctaaaagtgaaagaaatcatgtttagtgatttacttatgttttttaaaatagtataataattttatataatatatagaacttcagtataccttttgagtatatatggagttctttcttttttacaagatgtatatgtataaatggaaatgtttattacattacataaaaacctttaggtgctcttagatggatgttaatcataaaaaaagagattttgaaaaatataggctattataatttagaattacaaattataaatcttgccagtggatatgggagttcaacatgtcacttaccccaatttgtggaatgttaaataactataaagaggaaaggagaaaaaatgataagaatggttaaagaaaaagaacgaatagcaaaattaaatttcgaatagctgtgacgagcttaataattcaagtacttaattttatcaaatcgttcttttaaaaaggtaaagggcaaaagacctttaccacattaaatagggaggtggtatttatgacaagagaattaaggaaaaaattaactctctatcttaacattgcaactttaatattatttattattaatttaactagaaaaaataaattattctttcattttgacaaaaattatgaaccagtttaaagaaatttataatacaatagaaaaattactaaatgataaatcaatatctaattatagaattaatcaagacactggtgtttcttatggtggtataagtgaattaagaagcgggaaaagaaaagtgaataatttaactttagaaacagcggaaaaactctataattaccaaaaacaattagaaataatgattgaatattaaaataaggccatatcttttgaaatatcatggagtgagccttttaaatcatctaattttaaagtatattaaatatggatagcttaatgtgaatataaataaaaaattatcaaataatataatatagaatatatgaagacaagaaattttataaatatataataaaaaaccaatactattaggtattagtttatgaattaacaagtttggcaactacaaagaaacaatgtattgctaaacgtagttactgcattaggattattataattataaatagaaagagagcgtgattaaaaatgaatgagattgaaactattataagtgaaatagaaaagttattaactaacaatacaccatatagtatttcaaaaaattcaggtgtaccacgtcaaacagttacagatttaaaggtaggtaaaactaaaataaaagaagctaaatttaaaacgataatcaagttatatgaatatcaaagaacattagaaaataaaacagaatgttaacaaaaatattttgttaggttaggtggacaagaaattaaatttctaatgatttcatggttgtctgtccacgttttgtccacctcaataagataatctcttagttttagaaattgtacatggttaaataatcaaaaatgcatattatgaaattatcattgccattaaatcttgaataatctttaagtgatgatattaaaggctgaacacagtaaataagttaattttaatgcagtattctatattatacatattttgtaataatgtttgtgcgaattattttttattgacaattttttatattaaattgtgtaattggcatatatgatgatttgtgataattatattgtaatatagcatttggtttatgattccaaaattaatagatttgaaaagtatactttatttcatgaaagtttttggtacatttatttgaaaatgtttttattacaaagttacatggctaaatgtttcttaacaaaattaatttttcgagtgtaaagaatcgtgtggtaaacataatttatatagattataaggaggtgaaaatggtcgaggaagttaaaacgataaaatagtttgaatcttttgatttcaattctggtaggactattgaatttgcaatctaataagaatgtgaggtttgatttaatatgaagtcatattctttgaataaaatattactttctcaccattagtaaaatgaagatgactattaaagtgcgaaaaacaaataaaaaagagaaaatagaatttttaatagggacgtttataattattttagtaatattagggttcaaaattatgaaataaatgtatagtatttgagaaggctatatgactccggaaaaattaaagtctaaagatatctcaatatctaaaatctaaaagactactggagttagtagtttgaatattgaaagactctaatctaataaaaatacataaaaggtttaactttagaagtggttgtaaacttcaatgaatattaaacattgaagtttagtaaaaggcgtaaggtataaaagcaatcgtttgtctttgacaaagtaattgatgatgaaaagtcgttaatatgttgaaagaaaaattgataatatgaaatttaactattatgaagtgatgatagccattaatgaatagaaaaataataaaatcatttataaataaaaactacgttgagttcacagatttcgaaaaaagcagtaaaaattgtacagatatggagatgaaaaaatgtcagaatacaagaaaaagataattgaattaattgaaagtaatttaacaggatatgaaatttctaaaaaaactggagtttctcaatatgtactttcacaattaagacagggcaaacgcgaagtagataatctaaccctgaatacaacagaaaaattatatgaatatgccaataaagttttgtaatataactactgtataaattaatcaagctatgtttatttgatttaactattaataaaaatcatatggtaaatggatattataatgattaaaatacaaaaatagtacattccaatttgtgaaaaaggagtatgtcgtttcatttagaatttattacactaaattagcatcgaataagggaaaatgagtgttaagttttaaatgataaaatagattggaatggatcgtcttgaaatgctcccttcaaagttttcattttttcaatgtctacttcgaaggggcatttccattatattgttatagctttttatatttgtataatgaacatataagtttaagaagatgagagtgaaggaaataaaaaagctcaaatgtaccaaattgttaatcttaataaatctctactttataaagattgaatggacattcgagcgttaatcagtcaggagggaatttcactcctacaatttaataataatacttgcttcaacactgtacaaggagtgatttgttatgttcaaagtgaattattcgattttaagttattatccagaatataatatcgcagtaagttggcaacgtttaagagaaggaaaaacaataaaaaacaagatttaatactgctgcgtcatgaggcgcttgaacattatttgatgaataagtataatttcaactatgattatgcatataaaattgtatcaaaaaatacgattattcaatttttataaaaaagaaggtggattaaatgcttacattaataaaattgaaagaagatgaacaggttataatatatgaatatatacctgaagatgatataagtaacggtaaaggttcagtaacttttaataaaaaagatgcagaggttatagatttctcattatctgaaatagaaaatgaagaatattttatgttatatcgtaataagtctttttctgtagtaagagactttatcgagaagcaagaatttcccgaaaattataaaatagcatggtattaaagcatcctttctacacagataaagagaaagcgatgctatttttatatgcttttttcattattcgttgaaaaagaagagtcacaaaagttaacatatttaaaagaacttggtgaagatgacgaatataaatatgttgccaaaatagatagtaaaacatctaaattatgtcattcactcaacggaaaaatatttatagttaaagatatgataccaggtgtgaatgcgccacctatgcatccttggtgtagaagtaccacagtgccacatgttggcaattggtgagacaagttcattaaagagcgtgaaggtaagtatcaagtagaagtaaaagaagcaaaattacaagaaaaagctaaaaaagaaatgcttgatatgataagtaatggtaaaataaagatgcaattgaataatgaaaaacaacagcgtcatattttaaacacaaatgaatataataacaagaaaaataattcatctttcttacccagttatattacaatagattctaatgaaattgaaaaggtgactaaaaaagaatttattgattttccagttttgtttgatgatgaagggaatttcagaaaaaaacaagttatagattacaaaaagataataggtaaatcttatgtgaatggtaaatatatgttgaaacgaaattaggtaaagttcattattctaaaactggttttcatgtagttccgtatattgaaaaggagtgattaaatatgaatttacagtcatacatagtcaaattagtcaaattaacgcttactaataataaaatattaattggaaaagtgatagactttgatgataaagttgataattttgatggttataattcgatagaaattgatacaggtagaattacatatgatatatcagaaaataaaattaaaactattgttttacaaaaatagcatcctttctacacagataaagagaaagcggtgctattttttgcacttttataacaactaaggatacaagacatataccttcaacaatatcctcatttaaacctatcgatttcctaagctcaattttaaacacaaagtttatttgaaatgatgcacacctataaaaatcttaatcatcgaaaagtcacaaacatctccatattaaaaacttaaatagtgcatttcatttaaactaaacatagatattcttacaaatatatacttagtaattcgattgttaatacatcactttcataaaataactataaccatcataatacttctcaaatctcgtcaaattaaagtaaatacagcacaaattaacatttttaaatatataaaataaaacaagatactcaataatctgtagtatcttgttttggaataatgtaattttatatcatcaacggcttcaaatgagtagtttcatataaatcaataaacacaactactcaactgatcttaattaataaatgatttgtcagatgacacataacagcattattagattaattctaatagtttgtttaaattttcttcggttgtcgcccagctggttgcgaatctaacaacacgatgttgatcatcgtatttttcccaaacagcaaatttaactttttgttctaactctgctattttctcgttacttaaaataaaaaattgttgattggttggagaatcaaagtaaagacgatagcctttatttttaaacccgtctttcatcttatttgccatttcgatagcatgtctgcttatattaaaatataaattgtccgtaaataattctaaaaattgtatgcctgttaaccgtccttttgctaaaagggcaccgtgatgtttgattcgagtggtaaattgtttcggttcattatttttcgtaaaaacaatggcttccccgcataatgcacctatcttcgtaccacctatataaaatacatcacaatatttagcgatgtctttaatagtcatatctgattgatcactcatcaatccataccctaatcgtgcaccatccataaataatggaagctgatattgcttacatactttgcataactcttccaattctgatttagagtataaagtgccatattctgtaggatgagaaatatataccattcctgggaataccatatggtcctttttaaaatcacttttaaatgtctccatgtaagtttcaacatctgaagcactaacttttccttccttagagggtatagtaattactttatgtccactatattcaattgcaccaccctcatgcacagcaacatgaccagtgtctgctgaaatgaccccttcgtaactttctaacattgaattaataacaacctgattggtttgtgttccacctactaaaaaacgaattgtagcatttggacaatcaattgtatctttaatcttttcaattgcctgagctgtgaattgatcaaagccatatcccgaagcttgtacaagatttgtatctactaatcgttttaatactttttcatgagcaccttctaaataatcattttcaaatgagatcactacatttccccctaaaactaatatcagcattttaatatgataaactaatttcaaaactagttcgatatttaaaatgtattgtgaattgttaaagtttgtatcgcattatcgcgaagttgaataaatatattatacatcaaacaatacattaagaaaattaattaaattttaatcatagcgacttttcatgctggaacacatatattaatgattgaattttactgttaaaagttctatgatttaggaaatagagaaaagaggggatttaaatggaacaaattaaacttaaaacttttacagctgagactttagagttattagaaaaaaacattaatgcttttttaagttctgaagaagctacaaatttaaaattagtaaatattactattaaagaaatagaagaaagaacattcccaaataatgaagaagaattcaatgcaattttaactttatctgtgaataaataatatgatgtgaaaggtgcaaaatgttttttgtgcctttctttataggagaaaagactatgcgatatacattttcaaatgatttaggaacactttttaccattattttagccattggattcatcattaatttagtattggcttttattattatctttttagaaagaaatagacgtacagcgagttcaacttgggcatggctatttgtactttttgtcttaccattgattggttttattctttacttgttttttggtagaaccgtttcggcacgtaaattgaataaaaacaatggtaacgtgttaacggatttcgatggacttttaaaacaacaaatagaaagctttgataaaggtaattatggtactgataacaaacaagttcaaaaacatcatgatttagtacgtatgcttttgatggatcaagatggttttttaactgaaaataataaagttgatcatttcattgatggaaatgatttatatgatcaagttttaaaagatattaaaaatgcaaaagaatatatccatttagagtactatactttcgctttagatggtttaggtaaaagaattttacatgctttagaagaaaaattgaaacaaggtctagaagtaaaaatattatatgatgatgttggatctaaaaatgttaagatggcaaattttgatcactttaaatcattaggtggcgaagttgaagcattttttgcttctaaattacccttattaaatttccgtatgaataacagaaatcatagaaaaatcatcgtaatcgatggtcaactaggttatgtcggaggatttaacattggtgatgaatatctaggattaggtaaactagggtattggagagatacgcatttacgtatacaaggggatgcggttgatgcactgcagttgcgatttattttagactggaattcgcaagcgcaccgtccacagtttgaatatgatgttaagtatttccctaaaaagaacggaccattgggcaattcaccaattcaaatagctgcaagtggcccagctagtgactggcatcaaattgaatatggttatacaaaaatgattatgagcgctaagaagtcggtatatttgcaatcgccttatttcattccggataactcatatataaatgccattaaaattgcagctaaatcaggtgtagatgttcatctaatgattccatgtaagccagatcatcctttagtttattgggcgacattttcaaatgcctctgacttattatcaagtggtgttaaaatttatacgtatgaaaatggatttatacattctaaaatgtgcttaattgatgatgaaatcgtatcagtgggcacagcaaatatggactttagaagttttgaattaaattttgaagtaaatgcctttgtatatgatgaaaatcttgctaaggatttaagggtggcttatgaacatgatattacaaaatcaaaacaactaaccaaagaatcatatgccaatagaccgctgtctgttaaattcaaagaatcgttagcaaaattagtttcgccaattttataatttatttgtaaggagtctcgattatagaggctctttttattttgcccaaaattaaaataacgataaatatattatgtaaacctaataatgacatttgtcatttcaaatctatgacaaagtgttctattttaaatctaataaatttactaatattaaattaagaaaaaaatagaggtgattaaattgattcaaatatctaatatcaacaagtcatttaataaaagatgtgttctaaaaaatatttcgttcgatattgaacaaggtaaatgtatcgctttaattggaaaaaatggtgctggaaagtcaacgttaattgatatattaattggtaatgttaatgctaattctggtgagatatttgataaagacaagttattacaaagtgaaaatcgcagtataatgttccaaaaaacgatgtttccagatcaattaaaagttattgagattatcaacttatatcaatcattttacgaaaatccattaccattggaagaaataatagaactgacgaaatttgattctagtcaactgaaccaatttgtaaataaactttctggtggtcaacaacgattactcgattttgtattatctttaatcggacaaccacaattgatcttattagatgaaccaacatcgactatggatatagaaattagagaatatttttggtcaattattgaaaatttaaaagaagataatcgaacgatactctatacatcgcactatattgaagaagtcgaacgtatgtcagacaaaattattctcattgaaaatggagaaataatacttaatgattcaacgtcacatattagaaccaatcagcaatctcagattacgttatccgatgaatatataagaaagttaaaactagataaagatgatttagttattcaaaaaaatcataatggcactatcaaaattattacttcaaatgtaaatgatacgattttatatcttcaacaacttcatattaatttggatgatattgaaatacaaaaagtctcaattgttgattcatacttcaacaataaaaagcaaaggggatctaattatgatactaagttacttgaaaatcgaatttaaagttataatgcgtaaaaaaacaacattaatattatctattttatttcctgtgatattctatatattatttacttcgatattggaattgccggaagatgttaaacctaaattttataaagagtatatgtatagtatgacggtttatagtttgttaagttttagtttactaacttttccattagatattattaatgaaaaacaaaatgaatggcgccaaagattaatggtaacaccatttacttttactagttattatatttcaaaagtagtgaaaactatgctgcaatttgcaatagcgatattagttatttttatggttggacatttttataaaggtgttgcaatgagtgcagttcaatggttagagtcaggaatatttttatggttaggtgcgtctctattaataacttttggcatattattttctttgttaaatgatattcaaaaaacaagtgctttagctaatatcgtaacaattggtttagcagtattaggtggattgtggtttccgataaacacatttccaaattggcttcaacatgttgctcatgttttaccgagctatcatttgcgtaaactaggtgtagatattgcttcaaatcatcatatcaatttaatatcatttgctataatactcttgtatgttttagggagtataatagcagtatattgtattagtcattttaaaagggcggaataaaatatgaaatttttaaaagatacttcaattgctgaaatatcgtctatactttatctgatttttcctattgccggtatattttttaatgaagtatatggtcccaaatggttgtatattatatcagtcattgtcttttcgttgtcgtatcttatattagttatagtaaataatagacttaatacattaatgttttacattttgttgattattcattattttattatttgttattttgttttcagtgtacatccaatgctaagtttgtttttcttttatagtgcttttgccgttccatttacttttaaaaataatgttaaaaaaacggcaactaatcttttcatactaacaatgattatatgtacaataataacgtacttattgtataacaactattttgttgcaatgatggtttattatgtcgttatatcgttaataatgctagataattttaaaaaaatgaaaaaccgtgaatatcaaaaagaaatagcagaaaaaaatagacatattaatacattaattgctgaacaagagcgacatagaattggtcaagacttacatgatacgttagggcatgtgtttgcaagtttatcattaaaatcagaattagcttataaactaatagatactgatgtagaaaaagtaaaagctgaattattagcaattaataaattatctcgtgaatcattgaacaaagttcgagaaattattgatgatgtaaaattaccatcatttattgaagagattgatagtatacgtaaagttttaaaagatgctgatattgattttacatttgaaaataaagaattagcgcaagtattaagtcctactaaacaatctatgttagttatgattacgcgtgaagcgataaataatgttattaaacatgcaaatgcttcaaaagttcatggtaaattaaaaactgtaaacaatcataaattactgcttatgattgaagatgatggcaaaggtatcgatagtgattgtgaggtgaaaagtatttcacagcgtgtacaacatttaaatggaactttagcagtcgactcaacaaatggaactaaaataatcattgaaatctcaacaggaggaatagcatgacatctttaattattgcagaagatcaaaatatgttacgacaggcaatggttcaattaattaaactacatggtgattttgaaattttagcagatactgataatggtctcgatgcaatgaaacttattgaagaatataatcctaacgttgttattttagatatagaaatgccaggcatgactggacttgaagttttagcggaaattagaaaaaagcatttgaatattaaagtgattattgtaacaacttttaaaagaccgggatactttgaaaaagcagttgtgaatgatgtggatgcatatgttttaaaagaacgttctatagaagaattggtggaaaccattaataaagtaaataacggagagaaagaatatagcgccacattgatgacttcattttttgtagataaaaacccattaacgcccaaagaacaaattgtattaagggaaattggcaatggtttaagtagtaaagaaataagtgaaaaattatttttgacagatggaacagttagaaattatacatctgttataattgataaattatttgcagataatcgttttgatgcttggaaaaaggcaaatgaaaaaggctggatctaaatacaaacaaaaaagtattgagtgttttgatttaagagacttggaaagtgagtcaataatcaaaatcttactcaatacttttattttggtactcgcaatttagatttgttaactaattttttcgcttattataaaacgaaacaatcaagtaaacgataaagcctacaaagatacccaataaaatagatagtactgccgtcactattaatggtaatttgaaaaatatttgtaggaaaataccaatgataattgcgataattactgcaattaatgtgactgtattttcatttgaaatgttcatttattttcactccttaacaataacattatatcatgctatagctttccaaaatattgaaatatgtagatatggctattgacgatatttcttaacttttatatgattaatcggaatgaaaaaagagaagtaggtggcaatatgaagtcaaataaatcgcttgctatgattgtggtagccatcattattgtaggtgtattagcatttcaatttatgaatcatacgggtcctttcaaaaaggggacgaatcatgaaactgtagaagatttaaatggtaaagataaagtacatgttcaaagagttgtggatggtgatacatttattgcaaatcaaaatggtaaagaaattaaagttaggcttataggggttgatacgccagaaacggtgaaaccgaatacgcctgtacaaccatttggcaaagaagcatcaaattatagtaagaagacattaacaaatcaagatgtttatttagaatatgataaagaaaaacaagatcgctatggtagaacattggcgtatgtatggataagtaaagatcgtatgtacaataaggaattagtggaaaagggacttgctagagagaagtatttttcaccaaatggcaaatatagaaatgtatttatagaagcacaaaataaagctaaacaacagaaattaaatatttggagtaaataattaaataggtgattatatatattaaagtaaaatatacttgaagcatcgatttattattaccataactttatatataaagaaataatttaaaggcataataaccatagtgcgtatcgagcgtaatggattattatgcctttgattttacttgaatatagctgtgatttgatcaacctgttctttatttaaagggtgtttagatagctctatggcttcgctaataatacgtcgtaatgaagattttgttgaaacggtatcaacatatttatctctttcttcagaaccttgaatgatattaactgtaccatcactaaagtaaataacaccggtactttggactttaaagttaaagttttgttcaatatgatcctttaatgctttagcattatttgctgctaattgatatggatcataatcataaaaatcataaataacacgatttggttgaactgtttctgtaaaagtatagatagactttcttgatgaattaaactgatcatgatattgctggctaatgtaatgaccgacaactttttcaatattactattgctcatttctgtatcatgctcatcaggtacatcaaagtgataaaatgttttttcaccccaactttttacatcaacgtttattaaaccgatatctgaaacaatgataaaatcaaatgaacgtgcatactcgaaaaacggatgtttagtagctaaattgcttgtaacgataatatcgtaatattttaatttaccattttcgagatagctatctaaaatcttgcgtaattctcttttagcatttttgtatgcatggtgtccaacatcattattagaactcagcatttgacttcttaattcagcattttctgcacttaatgctttattctttttaataagttgctttcttgcataaacttcggtatctattttactattactatacctttgatttaaaactaatataccaattaatgctacaatgataatgataagtacaacataaaaagacattttttcaccaatcctttttgacttctttaactttgtatacaataataattaataaagattaattgttattcaatttcccacatttttattagttgattttagttcatcattgttataatcaaattataaactgacagatattgatgttcaatgaatatgacgtgaaagattcgtgaattcaagtttatgtcgaatttatgttataacggtcatttaaatgacagaattaggtcactcatagtattttgaagattgaattcattaattttaaaatgtataatgatatttgtgaaagcgcttgcttaggaggtgtatttgagagtgaatgaaatgaatgctaaagaacaattagtggacaatttaatgaaaacatcatcgcaattatttaaatttcacggtgaagttgccatgcagcttttcttaaatgatgaattaaaattaccttctattgttgaaatatgcgtggaacgtaagcgtttaagtgatattgtgaaagttattccgcaatcatatgcgttactatacatagataagcaagatcaagcaatagctaaagaagatttatcactttcaaaaattgcaaaagtttatgtgcaatatgatgatacaacaataatgagtattttcgtttatgatgtagtaaacgatgaatggatttttagattggatccgaatatacgtatacctaagagtaacatatacttccatagtttaaattgggatgtggattatattaaaccggagatcgttctaatgtatgatctaatgcaacaccatcagtatcatcattattccaattataaacgagtcatagatgcattaagctactatcaattttttattttaaaatttgtagtaggtgagcaacgtattaaggatgcaatccagagaacaataaataattaagaaaaagcaattcataacgcagttgaatacatgtgttacgaattgcttttatattagtttttatcacacaagttttttaatgcaaccccgtgatagcaaaactcatatgtagataatacagctttttcagcatcatctacatgaattccaaacatcatcgagatttccgaagcaccttggttaatcatttttaagttaatttttgattcagctaaggcatgtgtaattttatttgcagtaccgatgactttattcataccttcgccgacaatcattaatattgctaaatcatgctcaatacttagctcatcaacatcacatttttgacgaatttcatttaatacttttgtttctttattttgaatttgttttgaacgcataacgatactgatagtatcaatacctgaaggcatatgatcaaatgaaatattattatcctctaagacacctaatatctttctagtaaagccgacttgtctattcattaaatactttttgatattaatgacagtaaaatctttatcacaacttataccgctaatcacatttttcgcatttatttctctatcatgcactataaatgtacccttatcttgagggcggttcgtatttttaatcaccacagggatgcgatctttataaagtggttgtaaggcttcatcatggaaaacactaaaaccagcataagataattcacgcatttctcgataagtgatttcttcgattaattcaggatctttgatgatatttggattagctttataaataccagacacatcggtgaaattttcataaattgtggctctaacaccacttgatatgatggcgccagttatatctgatccgccacgtggaaatgtaactatatatccttcatgagatacgccaaaaaatcctgggataattagtttttcatcataatctcttaattttttaatttcagagtaagcactatctaatatttgtgcttcttgtgggacgtcagtaacaaaaatacccgcttccttcggtgatatatattttgttggtataccttgactattattatataaagctatcaattgcgcattaaaatcttcaccacaagaaagtaatgcatctaatagtctctttggttcattttttaattgattaatataatgttccaaagtcacatctatcgtccgtaaaatactttcatccatttgcaattcttttacaatatcatcataacgctgaataatttctctttttttatcatgataatcaagatgattaatgaccttttcatataatctgattaacaaatcagttgttttaatatcattatcatgtcttttacctggagcagaaacgataacaatctttcgctctggatcagaattaacaatatttaaaacctttttaatttgagtagcattggagacggagctaccaccgaatttggaaactttcatagtgcatgccaacctttctaaaaaatcagaaaattgtattcagttttgtaagtaagaatgatattatgtatttatattttgaatattacgaactttacaaaaataaagaataattctatactatactatcatctagtgtttttcaataatacatttgtttttctcaaaagcacaaacggaggtacataaaatgaaaaaattaaatatagcattattaggattaggtactgtcggatctggtgttgttaaaatcatcgaagagaaccgacagcaaattcaagatacattaaataaagatattgtcataaagcatattcttgttcgagataaatctaaaaagagaccgctaaatattagccaatatcatttaactgaagatgttaatgaaattttaaatgatgattcattagatattatcgttgaagtcatgggaggaattgaaccaactgtagattggttaagaacagcacttaaaaataaaaaacatgttattaccgcaaataaagatttattagcagtacatcttaaacttttagaagatttagcagaagaaaatggtgtagctttaaagtttgaagcgagtgtagcaggtggtattccgatcgtaaatgccataaataatggtttgaatgcgaataatatttcaaaatttatgggaattttaaatggtacctctaattttattttatctaaaatgactaaagagcaaacgacatttgaggaagcacttgatgaagcgaaaagacttggttttgctgaagcggatccaactgatgatgtagaaggggtagatgcagcgcgtaaagttgtcattacatcatatttatcatttaaccaagtcattaaattaaacgacgttaaacgaagaggaattagtggcgtaactttaactgatattaatgtagccgatcaactggggtataaaattaaattgattggtaagggaatatatgaaaatggcaaagttaatgcatcggtagaaccaacgttaattgataaaaagcatcaattagcagctgtagaggatgaatataacgcgatttatgttattggtgatgccgttggtgacacgatgttttatggaaaaggagcaggcagtttagcaacaggtagtgccgttgtcagtgatttattgaatgtagcattattctttgaatcagatttacacacattgccaccacattttgaattaaagacagataaaacaagggaaatgatggattcagatgcagaaattaatattaaagaaaaatccaatttctttgtagtagtgaatcatgtcaaaggttcaattgaaaattttgaaaatgagttaaaggcaatattaccatttcaccgatcattaagagttgcaaattacgataatcaatcatatgccgctgttatagttggattggaatcatcaccggaagaattaatcactaagcatggatacgaagttgacaaagtatacccagtagaaggagtttaattataatgagaagatggcaaggattagtagaagagtttaaagcacatttaccagtaaatgaaaatacaccaaaattaacattgaacgagggaaatacaccactcattcattgtgaaaatatgtctaaaatactaggtatagatttatatgtgaagtatgaaggtgccaatccgacaggttcatttaaagatcgcggtatggtaatggctgtgacaaaagcaaaagagcaaggtaagaaaattgtaatatgcgcttcgactggaaatacatcagcgtctgcagcagcatatgcagcgagagcaggtttaaaagctatcgtcgtaataccagaaggtaaaattgcattaggtaaattgtcgcaagcagtaatgtatggtgcagaaatcgtttctattgaaggaaactttgatgaagctttagaaattgtaaaagaaattgcaaaaagtggcgaaatagagcttgtaaactctgtcaatccatttagaatcgaagggcaaaagacaggctcatttgaaattgtacaacaattagacggtgaagcacctgatattttagcgattcctgtaggtaatgcaggtaatattactgcatattggaaaggctttaaagaatatcatgaagctaaaggatcacaattgccgaaaatgtttggcttccaagctgaaggcgcatcaccaattgttcaaaataaagtcaataaaaatcctgaaacgattgcaactgctattcgaattggtaatcctgctagttgggataaggcgactaatgctcttaaagaatcaaatggattaatagatagtgttactgatgatgaaattctagaagcatatcagttaatgacaactaaagaaggtgtctttagtgaaccagcaagtaatgcttctattgcaggtttaattaaattgcatagacaaggtaaattacctcaaggtaaaaaagtagttgctattttaactggtaatggattaaaagatcctgatactgctatttcactactagataatccgataaagccattgcaaaatgataaagatagcattatcgattatattaaaggagctttataacatgtcgaatgttttggagttaacaattcctgcatcaacagccaaccttggagttggctttgattctataggtatggctttagataaatttttgcatctgtctgtaaaggaaacatcagggacaaaatgggaatatattttccatgatgatgcatctaagcaattgcctactgacgaaacaaactttatttatcatgtagcacaacaagttgcttctaaatatagtgttgacttgcctattttatgtatcgaaatgagaagtgatattccattggcaagagggttaggttcgtcagcttctgctttagtaggagctatatatatcgcaaattattttggtgatatccaactgtctaaacatgaggtattacaattagcgactgaaatcgaaggacatcctgataatgttgcgccgaccatttatggtggtttaatcgctggattttataatgatgtctcgaaagaaacgtcagttgcacatatcgacataccagacgtggatgtgattgtaacgataccaacttatgaactaaaaacagaagcatcaagacgtgctttaccacaaaaattaacacatagtgaagcggtaaaaagtagtgcaattagtaatacaatgatttgtgcattagcacagcacaattatgaattagcaggtaaactcatgcaacaagatggctttcatgaaccgtatcgtcagcatttaattgctgaatttgatgaagtgaaaacaattgctagtcaacataatgcctatgcaactgtaattagtggtgctggaccaactattttaatatttagtcgtaaagaaaatagtggggaattggttcgctctttaaatagtcaggtagtatcatgccattctgaattggtcgatattaatatcagtggtgttaaagaacgaattgtataccaatagacgctttatattgtaaaatagtattaaatgcagaatagagaggagatttaatgcgatatgacaaattataaagttgtcgttttagatatggatgacacattgctaaattcagataatgtgatatcagaagaaactgcaaattatttaacagcaattcaagatgaaggttattatgttgttttagcatctggtagacctactgaaggtatgattccaactgctagagatttaaaattacctgaacatcatagctatattattagttataacggtagtaaaacgattaacatgactaatgaagaagtagaagtaagtaaatcgattggtaagcaagatttcgatgaaattgtagattattgtcgagacagaggctttttcgttcttacatatcatgatggtcaaattatttacgacagcgaacatgagtatatgaatattgaagcagaattaacaggtttaccgatgaaacgtgttgatgatatcaaagcgtatattcaaggcgatgtacccaaggtcatgggtgtagattatgtagcgaatattacagaagctagaattgatttgaatggtgtgttcaatgataatgtagatgctacgacaagtaagccattcttcttagaatttatggccaaagatgtttcaaaaggtaatgcaattaaagcgttatgtcacaaattgggatattcggtggatcaagtcattgcttttggtgatagtatgaatgataaatcaatgtttgaagtcgcaggtctagctattgctatggggaatgcatcagatgaacttaagcaatatgcagatgaagttacgttggaccataatgaaaatggtattccacatgcgctcaaaaaattgttataaattttaaaataagccttaacacatgatatttgaataagatatcttgtggttaaggctttttatttatgtgaaaatgacttcagttatactatggaggatttgaaatacatattttagattagtaatgatatcaaacgaatagagtaaatgtatattttttgaataaatcaagtattaactagtcacggaaggtaggtaaataaatttgatcattctgaataataacgaatgcattaaaaaatgcagtgacaatctaacattaattgttaaaatcactgcaagcatcttgattttatttagctgtttgtgtccagtcatgcttacctctgaaacgttttacatgagcatatatttggtcagcagtataatctaaatttgtataaactgtaatactgaacgctgattggttttcagcaaatgattcttcggaaaataattcctttaagtgcgtaaataaatcattcatttgtttatggtttaaaccgggatattcccttaaagttctctttaataattgtccgttcttttcttctaatgcttgaactacaataacaaatctttcatcttgctttagtacatcatcaaataaatttgtttgtccaatcattgaatttcacccctgaaaagttattgttatctatattatacacgatatgcaaaatttctaaaataaagaatggtaacatggtaataataaaatataaacagaatactagttaatacactttatactagaaaaagatattaaagtatatctgctttacaccattaaaaagcggcaaatgctatagataatctaaagcatctgccgtgtaagaatttatttatttttgattgtcataatcgtgtggttttaaattaattgtttctagctttacaaattttgttttgtgaatgattttatgaataaagtaaatcaacgctagaatgattaaaggtaaaaagtttttaaaagcatttaaccattgatcttttaaaatatattcaactgagccaccaaatagcaagaataatagtgtagtgatgacaatgattggtcctaatggataaaaaggtgctttatatggtaggaccttattagggtcttgaccttgttttttaatagcttgtcgcaatcgtatttgtgaccaaatgcttgatccccaaacaactataatcattgaaccaataatttcaagtaaattaaaaacggcatttgaattaaagtttgcataaataataacaataacaacgactgcataagtagttaataatgctcttaaaggtaacttagttgtcttgtttaatttacttaaaaattggggtgcttttttgtctgaacttaaggaatacaacattctgcctgttgtataaacacctgaatttgcagcggataataatgaagttaaaataaccgcgttgattactgatgctgcaaaggctatgcctactctatcgaatacaattgtaaatgggctttgacttattgaactacttgctcttaataatgatggatctgtgtacggaataattgcaccaattactgcaattgataagacatagaataaaagaatacgccaaaatacttgtttaattgccttaggcatagactttttagggtcatctgattcaccagcagttactgctactacttctgtaccaccaaccgaaaatccggcgactaataatacgcctaagaaaccagagataccaccaacaaacggtgcttggccttttgtatagttttcaaatccatatgtatgaccacctaagataccgaaaatcattaaaaagccaaaaataacgaatacgataattgttaacactttaatcaatgataaccaaaactcagtttctccaaatgattttacagaaaaaatgtttaataatagtaaaattgtaataaagattaagctccaagtaatggggtggaaaaatttaaatgtgtcccagaaataaagcacatttgacgctactatgacatcaacacttgtaactaatgaccacaatgcccaatacaaccatcccatggtaaagccaagagatgagtcaataaagcgtgttgaataagagctgaatgaacctgatactggataaaatgttgccaactctccaattgatgacattaagaaatatagcatgacaccaataacaagataagcgagtatagcgcctccaggaccagcttgagaaatgatattaccagtagctacaaatagaccagtcccaattgcaccacctatagcaatcatggaaatgtgtcttgagttaagactacggttcattttattatcttccatatttagtctcccatctatttaaatatacccattattgtaagctttttaagtgtactattcaataactatttagtactgtaaagcgaaaaaattaaaattttctgattttttaatcatcttgagcatgtttaattgtaattttgatggggttaaattataatatgtattaaattataattattataaattgtggagggatgactatgtcacaacaagacaaaaagttaactggtgtttttgggcatccagtatcagaccgagaaaatagtatgacagcagggcctaggggacctcttttaatgcaagatatttactttttagagcaaatgtctcaatttgatagagaagtaataccagaacgtcgaatgcatgccaaaggttctggtgcatttgggacatttactgtaactaaagatataacaaaatatacgaatgctaaaatattctctgaaataggtaagcaaaccgaaatgtttgcccgtttctctactgtagcaggagaacgtggtgctgctgatgcggagcgtgacattcgaggatttgcgttaaagttctacactgaagaagggaactgggatttagtagggaataacacaccagtattcttctttagagatccaaagttatttgttagtttaaatcgtgcggtgaaacgagatcctagaacaaatatgagagatgcacaaaataactgggatttctggacgggtcttccagaagcattgcaccaagtaacgatcttaatgtcagatagagggattcctaaagatttacgtcatatgcatgggttcggttctcacacatactctatgtataatgattctggtgaacgtgtttgggttaaattccattttagaacgcaacaaggtattgaaaacttaactgatgaagaagctgctgaaattatagctacagatcgtgattcatctcaacgcgatttattcgaagccattgaaaaaggtgattatccaaaatggacaatgtatattcaagtaatgactgaggaacaagctaaaaaccataaagataatccatttgatttaacaaaagtatggtatcacgatgagtatcctctaattgaagttggagagtttgaattaaatagaaatccagataattactttatggatgttgaacaagctgcgtttgcaccaactaatattattccaggattagatttttctccagacaaaatgttgcaagggcgtttattctcatatggcgatgcgcaaagatatcgattaggagttaatcattggcagattcctgtaaaccaacctaaaggtgttggtattgaaaatatttgtccttttagtagagatggtcaaatgcgcgtagttgacaataaccaaggtggaggaacacattattatccaaataaccatggtaaatttgattctcaacctgaatataaaaagccaccattcccaactgatggatacggctatgaatataatcaacgtcaagatgatgataattattttgaacaaccaggtaaattgtttagattacaatcagaggacgctaaagaaagaatttttacaaatacagcaaatgcaatggaaggcgtaacggatgatgttaaacgacgtcatattcgtcattgttacaaagctgacccagaatatggtaaaggtgttgcaaaagcattaggtattgatataaattctattgatcttgaaactgaaaatgatgaaacatacgaaaactttgaaaaataaatttgatatgtagtttctatattgcgtagttgagcagtttatgatatcataataaatcgtaaagattcctaacaagagagggtgtttaacgtgcgcgtaaacgtaacattagcatgcacagaatgtggcgatcgtaactatatcactactaaaaataaacgtaataatcctgagcgtattgaaatgaaaaaatattgcccaagattaaacaaatatacgttacatcgtgaaactaagtaattcttatcattcaaatacgacgatttgaaaataaagcgggcttacctattatattggggagctcgcttttttatgaaatttttgtgaagagtgattaatggattgagtttcatcggtagaacaatatatgattgtattagttgttactttattaaaatttgagaatatttatagaaggaaatagattactgattttataaagtcactttgttagcgaatgcttgaaagagtatttaatatagtagaatttaaaatttcaaagcggaatttaataagtacgaagtaattctgggtatgttttataaatgttcgataatacactttaatcttaaatatgatggtttagaaaatgatttaacaaagaaatgaaactttactgttgaattatgtgaggattgtgttattatataaatcgtaataattacgatttgataaaaagtgaggtaactatatatggctaagaaatctaaaatagcaaaagagagaaaaagagaagagttagtaaataaatattacgaattacgtaaagagttaaaagcaaaaggtgattacgaagcgttaagaaaattaccaagagattcatcacctacacgtttaactagaagatgtaaagtaactggaagacctagaggtgtattacgtaaatttgaaatgtctcgtattgcgtttagagaacatgcgcacaaaggacaaattccaggtgttaaaaaatcaagttggtaaaatcaaatttcgcactttagcccatttacaatatcaataaaacaatgtacagtatatacgaatgctataaactgaatgttttctcatattaataaggaaacattcggtttttaatttgcatttaaaaataattagtttttaaaggggctatttaaagtgaaaatatttgattacgaagatattcaattaatacctaataaatgcatagttgaaagtaggtctgaatgtgatacaactatccaatttggtccgaaaaaattcaagctacctgtagttcctgcaaatatgcaaacagttatgaatgagaaattagcgaaatggtttgctgaaaatgattacttttatatcatgcatcgttttgatgaagaagcaagaataccttttataaaacatatgcaaaattcaggcttatttgcatctatttcagttggtgtaaagaaagcggaatttgattttattgaaaagttagctcaagaaaaattaatccccgaatatattacaatagatattgcgcatggtcactcagattcagtgataaacatgattaaacatataaaaaaccatatacctgatagttttgttattgctggtaatgttggtacgccagaaggtgttagagaattagaaaatgctggtgctgatgctaccaaagtcggtataggtcctggtagagtttgtattacaaagattaaaacaggttttggtactggtggttggcagttagcggcattaaacatatgtagtaaagcagctcgtaaacctttgattgccgatggtggtataagaacgcatggcgacatcgctaaatcaattagatttggtgcatcaatggtcatgattggttcattatttgcggcacacgaagaatcacctggtgaaactgtagaacttgatggtaaacagtataaagaatattttggtagtgcatctgaatttcaaaaaggcgaacataaaaatgtagaaggtaaaaaaatgtttgtagaacataagggttcattaatggataccttaaaagaaatgcaacaagatttacaaagctcaatttcatatgccggtggaaaagacttgaaatcattacgtactgtagattatgttattgttagaaactctattttcaacggtgatagagattaatatttatagtaggtgatgtaaattaaaaaattcatagtaactgttgttgcgtttttatcaattattatcattgcgccaataacagaatttaaaccattcattcatttacaaaatgaagtaagacaatatattgacattcacatcaataaagaaacaatttctgcggaaaataaattggatacaccgaagaaacaacaatttgcctttaataatatacaaatgaacatgtcgaaatcagatgttgagaaaacattaaataaaccaaaaagagtgacatttaatgaatatggtacgaagtggtatacgtattatgatgacgattacaataattttataatgataagttacatgaaagataaagttaatgcgttatatacaaatcaaaatataatcacttcaaaatcaaaaattaaatacaatacacctaaatcggttgtaaggcaaagattaggcgaaccagaaacagagattgttaaaggtagagtgcgttacgaacaaaataataaagaatatgatgttttccataaaaatcacatttatacgacggtattttatgataagcatcgacgtaataatgtaacagctgttttacaagtaagtgatgctatggaaaatagattaaaagaacaatatggagcaccttcgaaatcgcttgcagatagttttgaactacaaaattttgatttagttaatgctgaaagaaaacaacatcaattatctacattgaagtattctaaacagaattctgaaactgctcgtaagcatagtaaagatatggccaaaaatcattattttgatcatacaaatttaaaaggtcaatcaccatttgatcgattgaaaaaagatggtattacatttaactcagccggagagaatttagcatatggtcaagttagtagtatctatgcacatcaaggattaatgaattctattggtcacagaaaaaatattttaaatgatacgtttaaaatattaggtgttggtgttgattttaatgatgaaaaacaacctttttggacagaaaattatactggttaatgtttttggtatgagtttaaagggtaatgtttgtctgtaaggaagtagataaacatgatgacaacagataaaccaaaagatgcggatatacttgaacgcgtcaaagatatacttaataaaaaagaaagaaaaaaataataatggctcgctcctgtaaattattacgggggcgagttttaatttgtgtaacattttgcaggaatctgtaattcaaaatttatattaaagaatgagattatctaacaattcgcaatttctgtttgaactgaatttagattagaataaataaaacctcttgaaaacgaaactttttcaagaggtccaaaatttataaaaatgagggtttaacaattacgataatatataacggtttaaaatattacatttcgcggtacaaaccaattactttcccaattacagcaacattgtcgaggtaaattggctccattgtactattttcaggttgtaatcgataacgatttttttctttatagaagcgtttgacagttgcttcatcttcctcagtcatagcaacaataatgtctccattttctgctatggtttgactgcgaacaattactttgtctccgtctaatataccagcctcaatcatactgtcgcctacgacgtttaatatgaatatgtcgctattatgtgtcgatgttaagtgttcaggtaatggaaaatactcttcaatattttctacagcggtaataggaacacctgctgtgactttaccaataactggcacatgaatcgtttcttccatattaatattatcatttgtttgatcacttacaatttctatagcacgtggtttcgttggatctcttcttatatatcctttttcttcaagacgtgaaagatgaccatgaacagttgaactggatgctaagccaactgcttcaccaatttcgcgaacactaggcggataacctttcatttgaacaacttgtttaatatagttatatatttcgctttgtcgttttgttaattctctcatatataggcactccctaaattaatttaaatacagtatatcattaattcacaaccaaaacaaacatttgttcgttaaaatattgacacagaacataagttctgataaattacttatacaaacaaatgttctaggagtggaaatgatgttttacaataaatataaaaacgtatcaacatatatcatcatatttttagtttcaagtgcagcctttgcaatattcttgttaagtgcgaacgttagtgctcactcggaacaagtgtacgaaatgactgaccatcaaattaagaacaatacgataaataaagcatacgaacataaagaccctacaaacaatggcgaacaaagagatgggaaagtgttcgctttaataaattgatacattgtcacaacgttattttgcctatttttgcgaaatagcgtttttttattacttttttgctggtcttaaatttgttatattttgttaaagtattataatgattgaataaacaaattgaaggtaggttttttaattgagtaattctgatttgaatatcgaaagaattaacgagttagctaaaaagaaaaaagaagtaggattaactcaagaagaagcaaaggagcaaacagccttaagaaaagcttatcttgagagttttagaaaagggtttaaacaacaaattgaaaatactaaagtaattgatccagaaggtaatgatgtaacacctgaaaaaattaaagagatacaacaaaaaagagataataaaaattaaatcacaaatctgtaaagaattttctgacattataacttgaaataagtattttacttatctttttattttaaaataagttataatgtatttgataaaattgaagaagggaagatacacaagatgtttaatgaaaaagatcaattagctgttgatacgctacgtgcactaagtatcgacacaatcgaaaaagcgaattctggtcatccaggattacctatgggagctgccccaatggcttacactttgtggacacgtcatctgaattttaatccacaatctaaagattacttcaatagagaccgtttcgtattatcggcagggcatggttcagcattattgtatagcttgttacatgtttctggtagtttagaattagaagaattaaagcaatttagacaatggggttctaaaacaccaggccatcctgaatacagacatactgatggtgtagaagttactactggaccacttggacaaggttttgctatgtcagtaggattagctttagcagaagatcacctagcagggaaatttaataaagaaggatataatgttgtagatcattacacatatgtattagcttctgacggtgatttaatggaaggtatatcgcatgaagcagcttcatttgctggacataataaattaagtaaattagttgttttatacgattcaaatgatatttcattagatggcgaattaaacaaagctttttctgaaaacacaaaagctcgttttgaagcatatggttggaattacttactagttaaagatggtaatgatttagaagaaattgataaagcgattactacagctaaatctcaagaaggaccaacgattattgaagttaaaacaacaatcggatttggttcaccgaataaagcaggaactaatggtgttcatggggcacctttaggtgaagttgaaagaaaattaacattcgaaaattacggtttagatcctgaaaaacgttttaatgtttcagaagaggtatacgaaattttccaaaatactatgttaaaacgtgctaatgaagatgaatctcaatggaattcattattagaaaaatatgcagaaacatatcctgaattagcagaagaatttaaattagcgattagtggtaaattgcctaaaaattataaggatgaattaccacgttttgaactgggtcataatggtgcatctcgtgctgattctggtactgttattcaagcaatcagtaaaactgtcccttcattctttggtggatcagcagaccttgctggttcaaacaaatccaatgtaaatgatgcaacagattatagttctgaaacacctgaaggtaaaaatgtgtggtttggtgtacgtgaatttgctatgggtgctgctgtaaatggtatggctgcacatggaggtttacatccatatggtgcaacattcttcgtatttagtgattatttaaaaccagcgttacgtttatcatcaattatgggattaaatgcaacgttcatcttcacacatgattcaattgcagtaggtgaagatggtcctactcatgaaccaattgaacaattagctggattaagagctattccaaatatgaatgttatccgtcctgctgatggtaatgaaacaagagtagcatgggaagttgccttagaatctgaatctacacctacttcattagtattgacacgtcaaaacttaccggttttagatgtaccagaagatgtagttgaagaaggcgttcgaaaaggtgcctatacagtttatggctctgaagagacaccagaattcctattattagcttcaggttcagaagttagtcttgcagttgaagctgctaaagatcttgaaaaacaaggtaaatcagtgcgtgttgtttcaatgcctaactggaatgcatttgaacaacaatctgaagaatataaagaatcagttattccatcaagcgtaacaaaacgtgttgcgattgaaatggcttcaccgcttggatggcataaatatgtaggtactgcaggtaaagttattgctattgacggctttggcgcaagtgcacctggcgatttagtagttgaaaaatatggatttactaaagaaaatatcttaaaccaagttatgagcttataagaataatttataaagcgagtatgtttagaagtctaggatgcataatcttaggcttcttttaaagtgttgaaatttagagtatagcacttaaactacatcataagtgataagttatgaaagtatactatttcagattaatctttaaaagctctgttataacagcatgatttttgatattatttttagtatcgatattaaaatacttgaataaactagttcttgaaataatgtgatgaatttagtaaaattcagtaggataaagaaagcgggtgaaacaatggcaacttggttagcaattatttttatagtagctgcattaattttaggtttaattggaggtttccttttagctagaaaatatatgatggactacttgaagaaaaacccaccaatcaacgaagaaatgcttcgtatgatgatgatgcaaatgggtcaaaaaccttctcagaagaaaattaatcaaatgatgacgatgatgaataaaaatatggatcaaaatatgaagagtgcgaaaaagtaaattcgcaattgatagaggctattttccagatatggaaatggcctctttttataatcaaattaataaaaacaaatatgtttattaaaattaaagttaacaaaatgacgaatagactgagaaatgctataattcattttgtatgatttacagagagtttatttaacgagaaggtgtctgcgtgctctatttaatattttcaatcattgtagctttatttatgggaactatagttatagttattcgtatgaaagctcaaaattatccggtaaatgagaaaaaaatagttttgccaccgttttttatggcgaccggtgcattgatgtacgtcgttccatattttaggctaacaggatcggaaatgctagaagcctttataattggtttgcttttttctacagttctaatttggacttctcgatttgaagtcaaaggtacagaaatttatatgaaacgatctaaagcatttccagttattttgatttcattacttatcattcgtactgtgatgaaaatattcattagtaatgaaatagatcctggagaattaggcggcatgttctttttattagcattctgtatgattgttccttggagagcagcaatgctatataaatacaaaaaactaaagaaaacattaatcaattaattacttttaaaaccacttgtgatcgacttctaaatcagtcaatgagtggttttaattttacttgaaaaggtgaaatgattatattaaaataaaagcgaacaaatgttctatatggaggcagtaatgaaaattatacatacagcagactggcacttagggaaaatattaaatggcaaacagcttttagaagatcaagcgtatattttagatatgttcgtagaaaaaatgaaagaagaagaacctgatatcattgtgatagctggagatttatatgacacaacatatccaagtaaagatgcaatcatgttattagaacaagcgattggaaagttaaatttagaactgcgtataccaataattatgattagtggaaatcacgatggtaaagagaggttaaactatggggcgagttggtttgaacataatcagttatttataagaacagattttacatcgattaattcaccaatagagataaatggggttaatttttatacactcccttatgctactgtgagcgaaatgaaacactactttgaagatgacaccattgaaacacatcaacagggaattacgcgctgtattgaaacaatagcaccggaaattgatgaagatgccgtcaatattttaattagtcatctgactgttcaaggtggaaagacatctgattctgaaagaccattaactattggaacggttgaatcagttcagaaaggtgtttttgatatatttgattatgtcatgctaggtcacttgcatcatccatttagtatagaagacgacaaaattaaatatagtggctccttattgcagtattcattttcggaagcgggtcaagctaaagggtatagacgtttaacaattaatgatggcattattaacgatgtatttattcctcttaagccacttagacaattggaaattatctcaggcgaatataatgatgttattaatgaaaaagttcatgtgaaaaataaagataattatttacattttaaacttaaaaatatgtctcatattactgatccaatgatgagtttaaaacaaatttatcctaatactttagcgctgacgaatgaaacttttaattataatgaagaaaataatgctatagaaataagtgaaaaagatgacatgtcaattatcgaaatgttttataaacatataactgataaagaattatcggatatccaatctaaaaagataaaaaatattttagaaaacgaattgagaaaggaggattaatgaatgaaaccattacatttaaagttgaataatttcggcccctttttaaaagaagaaattgatttttctaaaattgataataatgaattgtttttaataagtggtaagactggatcgggtaaaacaatgatttttgatgcaatgacttatgccttgtttggtaaagcatcaactgaacaaagagaagaaaatgatttgagaagtcatttcgctgatggtaaacagccgatgtcagtaacatttgaatttcaattaaatcatcgaatttataaagtgcatagacaaggcccttatatcaaagaaggtaatacaacaaaaacgaacgctaaatttgatgtatttgagatggtggatggcaagtatgaaattagagaaagtaaagtaatttcaggtacccaattcattattgaattattaggagtaaatgcagatcaattccgacaattgtttattttgcctcaaggtgaattcaaacgctttttaatatcaaacagtcgtgaaaagcaagggatattaagaacactgtttgacagtgaaaaatttgaagctatacgagaaatattaaaagaagaactaaaaaaagaaaaagctcaaatcgagaatagatatcaacaaattgaccttttatggcaagaaattgaatcatttgatgatgacaaaataaaaggcttattagagcttgccactcagcagatagacaaattgattgaaaatataccacttttacaagctaggtcgaaagaaatactagcatttgtaaatgaaagtaaagaaactgctattaaagaatatgaaataatagaaaagaaaacactagaaaataatatattaaaagataatattaaccaactcaacaaaaataaaattgatttcgttcaattgaaagagcaacaacctgaaatagacgaaattgaagctaagttaaagttgttacaagatattaccaacctattgaattatattgaaaatagagaaaaaattgaaactaaaattgctaatagcaaaaaagatatttctaaaaccaataataaaatattgaatcttgattgtgataagcgaaacatagacaaagagaaaaaaatgttagaagaaaacggagatttaattgaaagtaaaacctcttttattgataaaactagagtattatttaacgatattaataagtatcaacaaagttatctcaatattgaatgcttgataactgagggtgaacaattaggtgatgaattaaataatctaattaaaggtttagaaaaggtcgaagattcaataggtaataacgaaagtgattacgagaaaattatcgaactaaataatgcgataactaacataaataatgaaattaatataattaaagaaaatgaaaaagctaaagctgaattagataaactattaggtagtaagcaagagttagagaatcaaattaatgaagaaacaactataatgaagaatctcgaaataaaattagatcactacgataaatcaaaattggacttaaatgataaagaaagctttataagtgaaactaaatctgctgtaaagattggagatcaatgtccgatatgtggtaatgaaattcaggatttagggcatcatattgattttgacagtattgctaaacgtcaaaatgaaattaaagaaattgaagcaaatatccacgcaataaaatcgaatattgctgtgcataattctgaaattaaatttgttaatgaaaaaatatcgaatattaatattaaaacgcaaagtgatttttcactcgaagtattgaataagcgtctgctagaaaatgaaaatgcattgaataatcaaagagatcttaataaatttatagaacaaatgaaagaagaaaaagataatctaacgttgcaaattcataataaacaattgcgtctaaataaaaatgaatctgagttgaaattatgtcgagatctcatcactgaatttgaaacactctcgaaatataataatatcactaattttgaggtggattataagaagtatgttcaagatgtgaatcagcatcaagaactctcaaaggagattgaagataagttaatgcaattgtctcaaagaaagttaattgagcaaaataatctaaatcactatgaaaatcaactagaaacttacaataatgacttagaattgaatgaacaatctattgaaatggaaatgtcgaggctgaatttaactgacgacaatgatataaatgaaataatagcctggaggggcgagcaagaggaattagagcagaaaagggatacttataaaaaacgttatcatgaatttgaaatggaaatagctaggttagaatcattaaccaaggataaagagttattggactctgataaattaaaagatgaatatgagcaaaaaaaagaaaagatgaatacactgatagatgaatactctgctgttcattatcaatgtcaaaataatattaataaaacacaatctatagtttcgcatattaattacttaaatcaagaattaaaggatcaacaagaaatttttcaattggctgaaattgtcagtggtaagaataacaaaaatcttacattggaaaactttgtcttaatttactatttagatcaaattattgcccaagcaaatctgagattagcaacaatgtcagataatcgataccaactaattaggcgagaagcggtttctcatggtcttagtggcctagaaattgatgtatttgatttgcattcaaataagtctagacatattagctcgttatcaggtggagaaactttccaatcgtcgcttgcattagctttagggttaagcgaaattgtacagcagcaatcaggaggtatttcactagaatcaatatttattgatgaaggattcggtacattagatcaagaaacgcttgaaacagcgttagacactttattaaatcttaaatcaactggtagaatggttgggattatttcacatgtgagcgaattgaaaaatagaatacctttagttttagaagtgaaatcagatcaatatcagagttcaacaagattcaaaagaaattaaaacataaaaaatagagatggtactttggaatgtatagaacaaccttagcccatctctttttatttaaaaattattttttctcacgcaataaatctctgatttcagttaataacacaacattttcttccacaactgcttcttcttcggcttcttctttcttcattaatgtatttgcaatcttaacaaagatgaataaagcaaacgcgatgataataaagtcgataacagattggataaataaaccgtatttaataccccagaatgaccattctttagcaaaatcaactgatccgaaaattttaccaattaatggcatgatgatattttctactaatgaagatataatcttgttgaaagctgcacccatcacaacagcaattgctaaatctaagacgttaccttttaaggcgaactctttgaattcttttaacattacactcaacctctcttttttaaatgtaaccacaattatacaacaaataaaaaaattagaaaatagattattcaagaaaatttgattatcgcaaagacctttgttatcctataaaggtgcgtgagttattgaataaaatgtttagataatctttttattctactacataaaattaaatatagaattgaagggagtaattaattatgaattcttcttcaccagagaatccaaatggaaagaagtattcaccagtcttcatctatagtgcaattgttgttgctatagtcgtattacttggtgcatttttacctgaacaattcaactatgttaccaataatattaaaatgtggattacagaaaagttaggttggtattatcttattcttactacgattatcgtgttcttctgtatattccttatttttagtcctattggaaaacttaaactaggtaaaccaaatgacaaacctgagtttaatacaatttcatggtttgctatgttgtttagtgctggtatggggataggtttggtgttttatggtgcagctgaaccgatggcgcactttgctacgccacctacagcagatcccaaaactactgaagcttatactgaagctctacgttcaacatttttccattggggattccatgcttgggctgtttatggtgttgttgcgttagcgttggcatattcgcaattccgtaaaggtgaaccaggtttattatctagaactttacgtcctcttttaggtgataaagtagaaggtcctattgggatttttattgacgttttatctgtatttgcgacaatcgttggggtagccgtttcgttaggtatgggtgctctacaaattaatggtggtttacattacttgttcaatgttccaaacaatacgtttgtacaagcgattatcatcattgttgttactatcttatttatagcaagtgcatggtctggattaagtaaaggtattcaatacttaagtaacttgaacattggtttaggtactattttaatggtagctgctttaattgttggaccaactgttcttattttaaatatgttaactagctctacgggtagtttactaaacacattcttgtttaatagttttgatacagctgctttaaatcctcaaaaacgtgaatggatgtcttcatggacactttattactggggttggtggttaagttggagcccattcgttggagtgtttattgcacgagtttcaaaaggacgttcaattagagagttcatttctggtgtcttgctagttccagcaattgttagttttgtttggtttagtgtctttggtgtattaggcatcgagacaggtaagaaacacaaagaaatttttgatatgactcctgaaacacagctatttggagtgtttaatcatgtgccatttggcatagttttatcgttgattgcattattattaattgcatcattctttattacatctgctgactcagcaacatttgtattaggaatgcaaacaacatttggttcattaaatccatctagtatggtaaaagttgtttggggaatttcacaggccttaatagcatttgtacttttattagctggtggcggtaatggcgctgaagctttaaatgcgattcaaagtgctgcaattataagtgcattcccattctcctttgtcgtcatactcatgatggtaagtttctacaaggatgcgaaccaggaacgtaaattcctaggtttaacattgactccgaataaacatcgcttacaagaatatatcaagagtcaacaagaagattatgaatctgacattcttgaaaagcgtcagtcacgtagaaatatagagaaaaaagataactaataaaatttagttaagtatttaaataacaagtagtatgtcattctagtagctagaacagatatactacttgtttgtttttgtggaaaattgagtatattcaaaaggataagaacgagaatttcgttattaaactacgaattctcgatttttttatattttaagataggtttatttctgacaacttaatagaaagaggtttgacaaagctaaagtgaagtacgacggtataaaaaaattaactatacttttatagaaaattaactcagactgggacatagatcaatattctatgctctacgaagttatattggcagtagttgactgaacgaaaatgcgcttgtaacaagcttttttcaattctagtcaggggccccaacacagagaatttcgaaaagaaattctacaggcaatgcgagttggggtgagggccccaacacagaagctgacgaaaagtcagcttacaataatgtgcaagttggggatgggccccaacaaagagaaattggattcccaatttctacagacaatgcaagttggcggggccccaacatagaagctggcggaaagtcagtttacaataatgtgcaagttggggtgggacgacgaaataaattttgcgaaaatatcatttctgtcccactcccatcaaaagaatgacattgaaaagaaatattaaagtttggcgccacaattttctttctgctcaatgaaataatacgtttgaaaattgaattgaatcattcacgaaattgataattattctcaattaataaaaaatacttattacaccttacctgtatgataagttttgcttatatactctgattaaaaagtcaaaacctaaattaagcgttttctaagcatgatgagttgtttatcaataaatataataatacaatttaatcaaggcatataaatataaaaatgtatcaagggggatcattaaatggctgcaaattttaaagagcaatcaaaaaaacattttgacttgaatggccaaagttatacttactatgatttaaaagctgtagaagagcaaggtattactaaagtttccaatttaccttattcaattcgtgttttgttagaatctttacttcgtcaagaagatgattttgtaattacagacgatcatattaaagctttaagtcagtttggaaaagatggaaatgaaggcgaggtaccatttaaaccttctcgtgttattttacaagatttcacaggtgtaccagccgtagttgatttagcttctttacgtaaagcaatggatgacgttgggggagatattactaaaattaatccagaagtaccggtggatttagttattgaccactcagttcaagtggatagctatgcaaatccagaagctcttgaacgtaatatgaaattagaatttgaacgtaactatgaacgttatcagtttttaaattgggcaacgaaagcatttgataattacaatgcagttcctcctgcaactggaatagttcaccaagttaacttagaatatttagcaagtgttgtacatgttcgtgatgtagatggtgaaaaaactgcatttccagatacattagttggtactgattcacatacaacaatgataaatggtattggcgtactaggatggggtgttggtggtattgaagctgaagctggaatgcttggacaaccttcttatttcccaattccagaggttattggtgtacgactagtaaattcattaccacaaggcgcaacagcaactgatttagcgttaagagtaactcaagagctacgtaaaaaaggtgttgttggtaaatttgtggagttctttggtccaggtgtacaacatttaccactagcagaccgtgctacaattgcaaacatggcaccagagtatggagcaacttgcggattcttcccagttgatgatgaatctcttaaatatatgaagttaactggtagatcagacgaacatatcgcgctagtaaaagaatatttgaaacaaaaccatatgttctttgatgttgagaaagaagatcctaattatacagatgttatcgaattggatttatcaacagttgaagcatcgctttcaggaccaaaacgtcctcaagatttaattttcttaagtgatatgaaatcatcatttgaaaattctgtaacagctccagcaggcaaccaaggacacggtttagataaaagtgaatttgataagaaagctgaaattaactttaaagatggatcaaaagctacaatgaaaacaggtgatattgcaatagcagcaattacatcatgtacaaatacatctaacccttatgtaatgttaggtgcaggtttagttgctaaaaaagcagttgaaaaaggcttgaaagttcctgaatacgttaaaacttctctagcaccaggatcaaaagttgttaccggatatttaagagatgctggcttacaaccttatttagatgatttaggcttcaacttggttggttatggatgtacaacttgtatcggtaattcaggtcctttattaccagaaattgaaaaagcgattgctgatgaggacctattagtgacatctgtattatctggtaaccgtaactttgaaggtcgtatccatcctcttgttaaagccaattacctagcttcaccacagttagttgttgcttatgcattagctggaacggttgatattgatttacagaatgaacctattggtaaaggtaatgacggtgaagatgtatatttgaaagatatttggccatcaattaaagaagtttcagataccgttgatagtgttgtaacacctgaattatttattgaagaatataataacgtatacaataacaacgaattatggaatgagattgatgtaactgatcaacctctatatgactttgatcctaattcaacatacattcaaaatccatcattcttccaaggattatctaaagaaccgggtacgattgttccattaaatggtttacgtgttatgggtaaattcggtgattctgtgacaactgaccacatctctccagcaggtgcaattggtaaagatacgccagctggtaaatatttacaagatcatcaagtgcctattcgtgaatttaattcatatggttcaagacgtggtaatcacgaagtaatggttcgaggtacgtttgctaatatacgtattaaaaaccaattagcgccaggtactgaaggtggttttacaacttattggccaacaaatgaagtaatgcctatctttgatgctgcaatgaaatataaagaagatggtacaggtttagttgtattagctggtaacgattatggtatgggttcatctcgtgactgggcagcaaaaggtacaaacttattaggtgttaaaacagttattgcacaaagttatgaacgtatccatcgttcaaatttagttatgatgggtgtattaccattagagtttaaaaaaggtgaatcagctgattctcttggtctagatggtacagaagaaatttctgttaatattgatgaaaatgttcaaccacatgactacgtcaaagttactgctaagaagcaagatggtgatttggtagaatttgacgctatggttcgttttgactcacttgttgaaatggattactatcgtcacggtggaattttacaaatggttttaagaaataaattagcgcaataaaaaatagatatcacagtaaaatttcaatcggtatttgaggcactttgatagtgctcaaaaatacttctataaactttatgatataataggtcggttcaaaacctttgtgttcttggccggcctcttcttgtattttatgttagaatgagatataaagttaaactgaaagaaggcttaaaatgatatatagtattacagaaatagaagcgcgttatgctgaaactgataagatgggtgtaatttatcacgggaattatgcaacttggtttgaagttgcgcggttggattatatatcgaagttaggttttagttatgctgatatggaaaaacaaggaatcatttcacctgtgactgacctcaatgtcaattataaaaagtctattttttatccagaaaaagttaaagttaaaacttgggttgaaaaatattcgagattacgttcagtgtataaatatgagatttttaatgaaaaaggtgaacttgcaactacaggttccacagaattgatttgcattaaagaagatacttttaagcctatacggttggatcgttatttcccagattggcatgaagcttatagtaaagtgcaaacgctcaataatgaagggaaaacagtagagataatggatggtattgattctttataagttactgtaaatgtttggagaggcaatattaacaattaatctataagaaatagccaatacgttaacattaatgtaattagcgtgaagataagctaatatatagcaaaaacgaacttgttcatacaacatcagatgtgctaaaccaaagtacaacttccgaggttcaggacacatcagaatgtgtaaacaagttcgttttattttagttattttgtggaataagaaatttcatcttcgtgatcaactacatttacaataatgtggtcatcttcaaagtaccacaaatctttttccgctacgacaacatttaaatcgtcatattgttgttcatagccaatatcaacatcttcctttggttcaactgtaaaagcaggactaaatccttgcttgagttggaattcgccaccatatcttacaaaaaacacgagcactttattattttcaggcaactcaagttcatttttaaaccaagttactgctgcatcagtaagttctatttgcataacaatgacctcctatatttattacagaatgggagtgggccaacttgtattatttgtggaatttcttatcgaaattctctgtgttggagcccaccccaacctgctcattattgtaagctgaatttccataagcttctatgttgggacccccgaccagaattgaaaaaacctagttataagcgcatttcgttcggttaactacagctaatataacattgtggagcctatgacattgatttatgtctcggtctcaaatgttcttgtaaaaaaactaagtatagttgaattttaagttaaaaaaattgtttttgcaaaaataaaataatccatcaactgcaaaaaaatatgcaatgatggactaatgtcaaaaaattgttacatccattttattttaggttcttcgcctctaaaaatccttgcgatattagagcgatgtctaattatcaatatgattgaaactaagaaactaacgactaataaaatatagtcttgaatgataagcgagccaatcacacagcaaattgctgcaacgatacttgctaaagaaacatatttaaaaatcttcaatacaataaagaagataattgcaagtattagtaaaagtatcggattgactcccaagacgacacctgcactagttgcaacagctttgccaccttggaattttaaataaacaggataaacgtgtccaagtatagcgaataagccaacaattaaaccatttgtaaaaaaagtactaatagggccatctgcgtgaactggtaaccataaagggaagaaaacagttatgaaccctttgaaaatatctagaaatgttaccaagaatcctgcaggacgacctaatactctaaagctattagtagcgccagtattaccactaccaaattgtctaatatcttttttgaaaaataattttccaattacgaatccacttgggaaagcgccgataagataacttagtagtaacatgacgattatcatcataaatattacacatcctttaatatcttaggactattttatcatattcatttaaattacggctaaaaattttaaaaacggggattaatatatggaattaagctatgaaagttaattgatacttgcattttacgctgatttatataagaataactattgtatagttttaaaaacgaacgtacgtttgcaggaggcgaaatcattggcaatgaataaacaaaataattattcagatgattcaatacaggttttagaggggttagaagcagttcgtaaaagacctggtatgtatattggatcaactgataaacggggattacatcatctagtatatgaaattgtcgataactccgtcgatgaagtattgaatggttacggtaacgaaatagatgtaacaattaataaagatggtagtatttctatagaagataatggacgtggtatgccaacaggtatacataaatcaggtaaaccgacagtcgaagttatctttactgttttacatgcaggaggtaaatttggacaaggcggctataaaacttcaggtggtcttcacggtgttggtgcttcagttgtaaatgcattgagtgaatggcttgaagttgaaatccatcgagatggtagtatatatcatcaaagttttaaaaacggtggttcgccatcttctggtttagtgaaaaaaggtaaaactaagaaaacaggtaccaaagtaacatttaaacctgatgacacaatttttaaagcatctacatcatttaattttgatgttttaagcgaacgactacaagagtctgcgttcttattgaaaaatttaaaaataacgcttaatgatttacgcagtggtaaagagcgtcaagagcattaccattatgaagaaggaatcaaagagtttgttagttatgtcaatgaaggaaaagaagttttgcatgacgtggctacattttcaggtgaagcaaatggtatagaggtagacgtagctttccaatataatgatcaatattcagaaagtattttaagttttgtaaataatgtacgtactaaagatggtggtacacatgaagttggttttaaaacagcaatgacacgtgtatttaatgattatgcacgtcgtattaatgaacttaaaacaaaagataaaaacttagatggtaatgatattcgtgaaggtttaacagctgttgtgtctgttcgtattccagaagaattattacaatttgaaggacaaacgaaatctaaattgggtacttctgaagctagaagtgctgttgattcagttgttgcagacaaattgccattctatttagaagaaaaaggacaattgtctaaatcacttgtgaaaaaagcgattaaagcacaacaagcaagggaagctgcacgtaaagctcgtgaagatgctcgttcaggtaagaaaaacaagcgtaaagacactttgctatctggtaaattaacacctgcacaaagtaaaaacactgaaaaaaatgaattgtatttagtcgaaggtgattctgcgggaggttcagcaaaacttggacgagaccgcaaattccaagcgatattaccattacgtggtaaggtaattaatacagagaaagcacgtctagaagatatttttaaaaatgaagaaattaatacaattatccacacaatcggggcaggcgttggtactgactttaaaattgaagatagtaattataatcgtgtaattattatgactgatgctgatactgatggtgcgcatattcaagtgctattgttaacattcttcttcaaatatatgaaaccgcttgttcaagcaggtcgtgtatttattgctttacctccactttataaattggaaaaaggtaaaggcaaaacaaagcgagttgaatacgcttggacagacgaagagcttaataaattgcaaaaagaacttggtaaaggcttcacgttacaacgttacaaaggtttgggtgagatgaactctgaacaattatgggaaacgacgatgaacccagaaacacgaactttaattcgtgtacaagttgaagatgaagtgcgttcatctaaacgtgtaacaacattaatgggtgacaaagtacaacctagacgtgaatggattgaaaagcatgttgagtttggtatgcaagaggaccaaagtattttagataattctgaagtacaagtgcttgaaaatgatcaatttgatgaggaggaaatctagtgagtgaaataattcaagatttatcacttgaagatgttttaggtgatcgctttggaagatatagtaaatatattattcaagagcgtgcattgccagatgttcgtgatggtttaaaaccagtacaacgtcgtattttatatgcaatgtattcaagtggtaatacacacgataaaaatttccgtaaaagtgcgaaaacagtcggtgatgttattggtcaatatcatccacatggagacttctcagtgtacgaagcaatggtccgtttaagtcaagactggaagttacgacatgtcttaatagaaatgcatggtaataatggtagtatcgataatgatccgccagcggcaatgcgttacactgaagctaagttaagcctactagctgaagagttattacgtgatattaataaagagacagtttctttcattccaaactatgatgatacgacactcgaaccaatggtattgccatcaagatttcctaacttactagtgaatggttctacaggtatatctgcaggttacgcgacagatataccaccacataatttagctgaagtgattcaagcaacacttaaatatattgataatccggatattacagtcaatcaattaatgaaatatattaaaggtcctgattttccaactggtggtattattcaaggtattgatggtattaaaaaagcttatgaatcaggtaaaggtagaattatagttcgttctaaagttgaagaagaaactttacgcaatggacgtaaacagttaattattactgaaattccatatgaagtgaacaaaagtagcttagtaaaacgtatcgatgaattacgtgctgacaaaaaagtcgatggtatcgttgaagtacgtgatgaaactgatagaactggtttacgaatagcaattgaattgaaaaaagatgtgaacagtgaatcaatcaaaaattatctttataaaaactctgatttacagatttcatataatttcaacatggtcgctattagtgatggtcgtccaaaattgatgggtattcgtcaaattatagatagttatttgaatcatcaaattgaggttgttgcaaatagaacgaagtttgaattagataatgctgaaaaacgtatgcatatcgttgaaggtttgattaaagcgttgtcaattttagataaagtaattgaattgattcgtagctctaaaaacaagcgtgacgctaaagaaaaccttatcgaagtattcgagttcacagaagaacaggctgaagcaattgtaatgttacagttatatcgtttaacaaacactgacatagttgcgcttgaaggtgaacataaagaacttgaagcattaatcaaacaattacgtcatattcttgataaccatgatgcattattgaatgtcataaaagaagaattgaatgaaattaaaaagaaattcaaatctgaacgactgtctttaattgaagcagaaattgaagaaattaaaattgacaaagaagttatggtgcctagtgaagaagttattttaagtatgacacgtcatggatatattaaacgtacttctattcgtagctttaatgctagcggtgttgaggatattggtttaaaagatggtgacagtttacttaaacatcaagaagtaaatacgcaagataccgtactagtatttacaaataaaggtcgttatctatttataccggttcataaattagcagatattcgttggaaagaattggggcaacatgtatcacaaatagttcctatcgaagaagatgaagtggttattaatgtctttaatgaaaaggactttaatacagatgcattttatgtttttgcgactcaaaatggcatgattaagaaaagtacagtgcctctatttaaaacaacgcgttttaataaacctttaattgctactaaagttaaagaaaatgatgatttgattagtgttatgcgctttgaaaaagatcaattaattaccgtcattactaataaaggtatgtcattaacgtataatacaagtgaactatcagataccggattaagggcagctggtgttaaatcaataaatcttaaagctgaagatttcgttgttatgacagaaggtgtttctgaaaatgatactatattgatggccacacaacgcggctcgttaaaacgtattagttttaaaatcttacaagttgctaaaagagcacaacgtggaataactttattaaaagaattaaagaaaaatccacatcgtattgtagctgcacatgtagtgacaggtgaacatagtcaatatacattatattcaaaatcaaatgaagaacatggtttaattaatgatattcataaatctgaacaatatacaaatggctcattcattgtagatacagatgattttggtgaagtaatagacatgtatattagctaaaaactatatgcaatcacgaaattaaatgataaaatacagtaatgttaaattttgactaaattcaagggatttatattaaatgctgaccaagtacttatcgttaaattagcgatagactttgaccaaactaatataaatctcttgtattgtataagaaatgatgatgtatctctatatttactgaagtttcaattcggtctaattttatagaaggtgcatgattcatgtagaggatgcgaggggtttattttgaaagatttcgatagtttaattcctggatggtttaaagaatttgtccatgttggtaccgatttaatatggtctcaatatttaattggtctattattgacagctggattcttctttacaattagttctaaattcgttcaattacgaatgttacctgaaatgtttagagctttagtagaacgtccagaaactttagaagatggtaagaagggtatttcgccattccaagcatttgcgattagtgctggttcgagagttggtactggtaatattgctggtgttgcgactgcgattgttttaggcggtccaggtgcagtgttttggatgtgggttattgcatttataggtgcagcgagtgcatttatagaagcgactttggctcaggtttataaagtacatgataaagatggtggattccgtggtggtccagcttactatattactaaaggtttaaatcaaaaatggctaggtatcgtatttgcgattttaattacaattacatttgcatttgtatttaacacagtgcaatctaatacaattgcggagtcgttaaatacgcaatataatattagtccagtaatcacaggtattattttagcaatcgtaacagctattattatatttggtggtgtacgtagtattgctacgttatcttcgttaattgtaccgattatggctatcatttacattggtatggttttagtaatattgctatttaatttagatcaaattgttcctatgataggtacgattattaaaagtgcatttggtatcgaacaagtaactggtggcgctgtaggtgctgcggttcttcaaggtatcaaacgtggtttattctctaacgaagctggtatgggttctgcgccgaatgcagcggcaactgctgccgtaccacaccctgttaagcaaggtttaatccaatcattaggtgtgttctttgatacaatgttggtttgtacagcaactgcaatcatgattttactatattcaggattgaaatttggtgataacgcacctcaaggtgttgcagttactcaatcagcacttaatgagcatttaggttctgctggaggtattttcttaacaatagcagttacactgtttgcattttcatctgttgtaggtaattactattacggtcaatctaatattgaatttttatcaacaaatcgtgtgatattatttatctttagatgtcttgttgtagtacttgtctttgtcggtgcagttgtaaaaacagaaacagtatggaatacggcagacttatttatgggcttaatggcaattgtaaacattatttccattataggactgtccaatgtagcttttgcattgatgaaagattatcaaaagcagaaaaaagaaggcaagaaccctgtctttaaacctgaaaacttagaaattaacttatttggaattagtgcttggggcgctaacaaatataagaactctgataaataaatatttttaatgtaacgattcattatataaaaatcaaataaaccctgaggttttcaaattaaagcgaaaatctcagggttttaaatttgtactcaataatcatctgtatcattacactagttaatctaagatttgattatatattaatatagtaaggttgagatttatttcctccattggtgtgcaaagactataccatttataagacatattgttggatagatgaatataaatttattttagttttgcacaatttaatagtgcgttttagtttgtattgagtattaattcagataatatataaataaatagaattatttgtaaatatgggagtcagatttttttattatagttattccactttgagagacatcgaaattaaattaagatatatcatataggataggcgtgtaatagaacacaagtatttaaattattatactttcaagttagacatttccgatatataatcttaataatagaaaaataggtgatgataatgggagaatatattgttactaaaacattgaacaacaatgtcgtagtatgtactaataatgatcaagaagttattttaatcggtaaaggtattggttttaacaaaaaagagggaatggcgttaaacgaccaaactattacaatagagaaaatttataaattagaaagtgagcaacaaaaagcacattataaaagtttagttgaaatcgctgatgataatgtattacaagtaattattgattcgttgaattttatttctaatactgcgatgaatgttgattcaaaacaacttgtagtttcattaacggatcatattatatttgcttataaacgcttaaaacaaaatcaagttattagcaatccatttgttatggaaactatgcagttatatagtgatgcatatcatattgctaaacaggtgattgatcagttaaatgcagcattagatgtacattttcctgaagatgagataggatttattgcattacatattgcatctaatacagaagatttatctatgcatgagatgaccttgatcaataatgttattaaaaaaggtatagatatcattgaatcagaccttgtgacaactgttgataaggaatcattacaataccaacgttttataaggcacgtacaatttttaattcgccgattaagaagaaaagaatatatacatgcacaagatgattttgtgtctatgattaaaaatcactatccgatttgctataacacagcatataaaattttaactatgatacaaaaacaatttgatgttaatatcagtgagtctgaaattatatatttaacattacacattcatcattttgaagaaaggattaatcaatcctaaattaagtgtattacacgggcgtttcgttactgtaaagggtatttgtatggtatcattgatgttagtaattttacataagtggactgtttttatacaacatcttatgaatattttaagtggtggtgaatctataattgaatgaaaatgaaaagaatataagaaagaattttttaaaatttaccgaatcacggtatatgaagtttgttggtgggaatgatttagtcttctcattaatagcgctagtattgttgggtattgttatttttattttcgaaaaagtatcatatgtttttgatccttttatcatcgtttttaagacgatagcagcacctatcatcgtctctttaattctattctatctatttaacccaatcgtaaatatgatggaacgttatagaataccaagagttgcaggtatttctattatttatctagctgtagtaggtgttattacgttaattgttaatttattgatacctattattggttcgcaagtagatagtttagttaaaaattcaccgcaatatctagaaaaattaattaattctattgataaaatagcaaataatacgtttttctcttcgtattatagtcaaattaatgattggttaaattctttacctaagaaaataccatctatgttaagtgaatttacagatggctttgggtctaaaattgcaacgtttgcagaaacgattgctaatattggcgttgtgattgtcacaacaccatttgtactattctttatgcttaaagatggacatcacttcaaagaattttcaacgaatattatgccaccgaaattccgaaaagattttcatgatctacttgaaaaaatgagtgttcaagttggttcatacattcaaggacaaattatcgtttcattctgtatcggtatactgttgtttatcggttattcggttatcgggttgaaatatagcttagtattagctagtattgcggcagttacaagtgttgtaccatatttagggcctactatagcgatttctccagctattgtaatagctgctataacatcgccgtggatgctcttaaaattagcagtagtatggactttagtacaatttgttgaagggcacttcatttcaccaaatatcatgggtaaaacacttaagattcatccacttacaatcattttcattttactgtgtgcaggcaaattgcttggtattgtaggcgttattttaggtattccgggatatgctattttaaaagtattagttactcatttattccaattatttaaacgtcgatacaatcgtttctatggtaatgatgtaggtgaatatgatattaaagaaagtaataaaatagttgaataagtaataaaaaataccaatgactatatgtttgttggtattttttatggtgcttataatgttgggcagttacatttatgattatcagcacatgtttagcttataaatttttacgaaagtttagccgtttataaagcacatgcataatgaaacgagtatttgccacttgattagtacttcattattatgtcgaaaataaaaataagtggtatttttaatatattaagaagcactcataatcggctgttaattaataatatttttcataagtattgattcatcattttctttatgttaaatatgaatcagtatagataaccatattgttctgtttgagatagaaatattttctatttacttcttaatacagatatcaatatgacaaaagtgttatataaatcaaaggtaaatgatatgctatttttatggtttatatgatatattttgatttataacagaaataattagaattgatgtgaaaaaatgaatcaggaagttaaaaacaaaatattttcaatcttaaaaattacgtttgctacagctttatttatttttgtagcaatcacattgtatcgggagttatctggtattaactttaaagatacgttggttgaatttagtaagattaaccgtatgtccttagtgttactatttattggtggtggggcatcgcttgttattctatcaatgtatgatgtgattttatctagagctttaaaaatggatatatccttaggcaaagttttaagagtaagttatatcatcaatgcattgaatgcgattgtaggtttcggtggctttattggtgcaggcgttagagcaatggtttataaaaactatacgcatgataaaaagaaattagttcactttatatccttaatacttatttcaatgttgacaggtttaagcttattatcattgctaattgtattccatgttttcgatgcatctttaatcttagataagattacatgggtaagatgggtattatatgtagtgtcatttttcttaccattattcattatttattcaatggttagaccacccgataaaaacaatcgttttgtaggattgtactgcactttagtgtcgtgtgttgaatggttagcagctgcagttgtattatatttctgtggtgtaattgttgacgctcatgtatcattcatgtcctttattgcaatatttatcattgctgcattatcaggtttagtcagctttattcctggtggtttcggcgctttcgatttagttgtattactaggatttaaaactttaggtgtccctgaggaaaaagtattattaatgctacttctatatcgttttgcgtactattttgtaccggtaattattgcattaattttatcatcatttgaatttggtacatcagctaagaagtacattgagggatctaaatactttattcctgctaaagatgttacgtcatttttaatgtcttatcaaaaggatattattgctaaaattccatcattatcattagcaattttagtattctttacaagtatgatcttttttgtaaataacttaacgattgtttacgatgctttatatgatggaaatcacttaacgtattatattctattggcaattcatactagtgcttgtttattacttttactgaatgtagttggtatttataagcaaagtagacgtgccattatctttgctatgatttcaattttattaatcacagtggcgacattcttcacttacgcttcatatattttaataacatggttagctattatttttgttctgcttattgtagctttccgtagagcacgtaggttgaaacgcccagtaagaatgagaaatatagttgcaatgcttttattcagtttatttattttatatgttaaccatatatttattgctggaacgttatatgcattagatatttatacgattgaaatgcatacatctgtattgcgctattacttctggcttacgattttaatcatcgctatcatcataggtatgattgcatggttgtttgattatcaatttagcaaagtacgtatttcttctaaaattgaagattgcgaggagattattaatcagtacggcggtaattatttgagtcacttgatatatagtggtgacaagcagtttttcactaatgaaaataaaacagcatttttaatgtatcgttataaagcaagttcattagtggttcttggagatccgttaggtgatgaaaatgcctttgatgaattgttagaagcattctataattacgctgagtatttaggctatgatgttatattctatcaagttacagatcaacacatgcctttatatcataatttcggtaaccaatttttcaaattaggtgaagaagcaattattgatttaacgcaattttcaacttcaggtaaaaaacgccgtggatttagagcgactttaaacaaattcgatgaacttaatatttcattcgaaattattgaaccaccgttttcaactgaatttataaatgagcttcaacatgtaagtgatttatggctagataatcgtcaggaaatgcatttctctgtgggtcaatttaatgaagaatacttatctaaagcgccaattggtgtaatgcgaaatgaagaaaatgaagtaattgcattctgtagtttaatgccaacatactttaatgatgccatttcagtcgatttaattagatggttgccagagttagatttaccattaatggatggattatacttgcacatgttactttggagtaaagaacaaggttatacaaaatttaatatgggtatggcaacgttatcgaacgttggtcaattgcattattcatatttaagagaacgacttgcaggccgtgtctttgaacatttcaacggtctatatcgtttccaaggattacgtcgttataaatctaaatataatccgaattgggaaccacgctttttagtttatcgtaaagataattcgctttgggaatcactttctaaagtaatgcgtgtaatacgtcacaaataattaaaatccaagtgctaagaggtatacagttatgcctgaagcgcttggattttttggtttctataaagaatgatttataaaaaacggtacagataagaatatttaagtttcctatctgtaccgtattttaatattgaaatgagcttaagttaagtcgcctaacttttattatcagcccaatcagtttcatcaagtataaatgttattgcttatttttgtattcttggcgtattttttgttcttctgcatagcgctctggatttttcttataaaaatcttggtgatagtcttcggctttgtaaaattgtgacgctagtaatatttttgttgcaattgccttatcagcattaatcgtatttttaagctgctcgatatatgtctcagcgagttctttttgatgatcattagtgtagaaaatagctgtttgatattgaggaccacggtcttgatattgaccacctgtatctaatgggtcaatgactgagaaaaatatttctaataacttattgtatgagaataatgcaacatcatattgaatttcaacagtttctaaatgaccactcgtacctgattttacttgttcgtaagtaggattttcaatatgtccgcccatatatccagaagttactttttctatgccgtcaaaggtgtcaaatggtttcgtcatacaccaaaagcaacctccggcaaaataagctgtattaatattcatttttgacatcctttcattagaccttagtacgatttattaagaaatcacttgctttttgaattgtttttatataacgttaatatgtgattattatagtacacaaaaatctatttttgaagatataaggtaggtaaatatggataaagaaactaatgacaacgaatatagacgtcaaagtgaacatcgcacttcggcgcctaagcgaaaaaagaagaagaaaattaggaaattacctatcattcttctgattgttgtaattttacttatcgcattagttgtatatattgtacatagttacaatagcggtgtagaatatgccaagaaacatgcgaaagatgttaaagtacatcaatttaatggaccagtaaaaaatgatggtaaaatttctattcttgtactcggtgcagataaagcacaaggtggacaatcaagaacagattctatcatggttgttcaatatgactttatcaataaaaaaatgaaaatgatgtctgtcatgcgtgatatttatgcagatattccaggatatggaaaacacaaaattaattcagcatacgctttaggtggtccagagctacttagaaaaacacttgataaaaatttaggaattaatcctgaatattatgcagtagttgattttactggatttgagaaaatgattgatgaattaatgccagaaggtgtaccaattaatgtcgaaaaggatatgtcgaaaaatattggtgtatctttgaaaaagggtaaccataggttgaatggtaaagaattacttggttatgcaagattccgtcacgaccctgaaggtgacttcggacgcgtgcgacgtcagcaacaagtgatgcaaacattgaaaaaagaaatggttaattttagaacagttgttaaattaccaaaagttgcaggtattttaagaggctatgtgaatacaaacattcctgattcagggattttccaaacaggtttgagttttggcatccgaggtgaaaaagatgttaagtcattgactgtgccaatcaagaactcatacgaagatgtcaatacaaatactgatggtagtgcattacagattaataaaaacacaaataaacaagctattaaagactttttagatgaagattaaaaataaacaaggcgatttctatcatactcagatagaagtcgccttgttcgttttcaaagaattaattggcatgcatcttatgaagaattattgatctgactttcttacgccagccacaccataatggtttggtttcatttcttctataacaacgtgaattgcttgtctatttgcccccgttgttttttctacggcgtcagttacttcgctaactaaattttttaattgttcatccgaacgaccttctaataattttacattgacgattggcatcatccaaacctcctaatcattattaatttgagtatatcatgtaatacttaaaaattcatttgcaaaataacagaacatttgttctaaaatagttgaaatagaacacgtgttcgtatataataaggttcaagtaagggaggaataacagtgtataattatcatttattagaagatagggatgttctatgtattgaccaaaaaagtttttttgcgagtgtttcttgtattgaaaaggggctagatccattagaaacaaagttagctgttgttgcagatactaagcgtcagggttctgtaatattggctgcgacacctaaattaaaagaattaggcatcaagacagggtcgcgattgtttgaaataccacatagaaatgatatttacattatcaatccaagtatgcgtaaatatcttaatgtttcagttgctatttctaagattgcattgcgttatattccacctgaagatttacaccaatatagtattgacgaattttttatggatgttactgatagctatcatagatttagttctacagtacatgcattttgcgaaagacttaaacgtgaaatttatgaagaaacaggcatttattgtactgtgggcattggttctaatatgttattaagtaaaattgctatggatgttgaagcgaagcatagtcaaaatggtatagctgaatggcgatatcaagatgtaccaacgaaattatggccaattcagcccttgcgagatttttggggtattaatcgtcgaacagaagccaaattgaataaaagaggaatttttactataggagatttagcgaaatatccatataaatttttaaaaaaagagttcggtattttaggtgttgatatgcatctacatgcgaatgggatagatcagagtaaagtacgtgaaaagcacaagatcagcaatccatcgatatgcaaaagtcaaatattaatgagagattatcattttgatgaagcaaaagtagtaatgcaagagttaattgaagatgttgctagcagagttcgagcaagaaaaaaagtggcaagaacgatacattttgcctttggctatagtgatgaaggcggtgtacataagcaatatactttgaaagatccaacaaacttagaaaaagatatttataaagtagtaatgcattttgcagataaattatgtaataaacaagcactatatcgtacgctaagtatatctttgagtcaatttattaatgaggatgagcgacagttaagtctgtttgaagatgaataccaacgcaaacgtgacgaatgcctagctaaaacgatagaccaattacatttgaaatacggcaaaggtattgtgtccaaagcagtatcgtttacagaagcaggtacaaaacatggtagattaggtttaatggctggacataaaatgtaatgactatacggtttaaggaatatataactgtgattcgtataaaataagtctctaaagataaatatttcatatatcacaatagatttcacaataatatctaagaatacatgggaatttatcaaaagagacttaataattattggatataacaatcaaaatcactcaatgcttgcataccgcgttctcggtcagtaggatttttgaaactaatttttaaagcaccgtatatatcttcgcgtacttctaagattcttaagttgcttatagatatgttatgtaaactcatgatataagtcactttacttatcatacctgattcatccggaatatctacatatagatcatacgcagtatttagtccacctagttgtttagcgggtagtgcgtcgcgatacgatttagcttgggcaaaaaatgataacaatttttcagaatcattgctttcaattagtctttctaaatcttgaaactgactttttagctgtcgaatcatttctaaaatatacgttttattactcaaggtgatatctttccacatttgtgcattactactagctatacgagtgatatcacgaaaaccaccagctgcaagtttattaactaaatgatgttcttgaccgttcttttgactaacatgaactaaactagatgcaacgatatgaggtaaatgacttacgacgcttgttacgtagtcgtgttcttcagcagtagttacaataaatttagcaagagtaggtgataacagttcttttaacgtgtttgctgcttgctcatttcttggctcattatagactaaaatataataagcgttttcaaataagtgctttttagcatttagtacaccagatttatgactaccagccattggatgaccactgactaaatgaatattatgctttaataaattggattcgtgttgctgtatcattgctttagtactaccagtatcagaaacaataacaccaggtttagttggcatatctataagctcgctaagatatttatttgtgatagcaacaggtgttgcataaataattacatcggcttttttaatagcttcactataatttaaacatttttcattaataatgccgattgatttagctttatctaactgagaagtatctgcatcgtatgcaataatattagtattagggttatggtattttatattgctagcaagacttccaccaattaatccaagtccaacaaataaaactgttgtcatataaatcaccttatttcgaaattttcagaataataacattgtaaatgagctgttgacacagtgcaatagtaaataaaaatcgataatagcattaatagataaacggagataaatcatctacaataaagagtatagtaacacaatggcaacggaggggtaaatcaatggaaccaatattagaaatgattaaaacattaacaggtattaatagtccttcaggagacacagaagaagcaattcaatttgtcgaaaaatatgcaaaagacttgggttatcaaacaacactaacaaataaaggtgcgttattaataacagtgccaggcaaaaatgatgaagtacaacgctgtattactgctcatgttgatactttaggtgcaatggttaaagaaattaaagaagatggtcgcttagcaatagaattaattggaggattcacgtataacgcgattgagggtgaatattgccaaattaaaactgatgctggtcaaatatatacaggaacaatttgtctgcatgaaacaagtgttcatgtatatagaaataatcatgaaatacctagagatcaaaagcatatggaaataagaattgatgaagtaactacatcagaagaagatacaaagagtttaggtatttcagtaggtgattttgttagctttgatccacgtacagttatcacgtcatcaggttttattaaatctcgtcatttagatgataaagctagcgtagcgatgatactacaattactaaagaaattaaaagaagagcaaataatattaccacatacaacgcaattttatatttctaataacgaagaaataggttacggtgcaaatgcatcaattgattcgaaaatcaaagaatatattgcattagatatgggcgcgttgggagacggtcaagcatcggatgaatatacagtttctatttgtgccaaagatgcttcaggtccatatcataagcaattgaaatcgcacctagttaatctttgcaaaataaataacattccatataaagtagacatatatccatattatggttcagatgcttcagcagctttacatgctggtgcggatatcagacatggtttatttggcgctggcattgaatcatctcatgcaatggaacgaacacatattgattctattaaagcgacagagaaattactatatgcatattgcttatcaccaattgagtaaacaattagtgttgacaaatgtgaacgacctatgtaatataatgaactataaaaataattagaattttctaaagaaatagtagcagatatgaaacgtagcaaatagaaagctaatgggtgatgggaattagcacgccatatcttgtgaattggactttggaaaacaattgaatgagttttgaaagtgaacatgaattatgttaactaaggtggcaccacggtaacgcgtccttacaggtatatgcgttatgtggtgtctttttatttagacaaaatgtagtagttaattaaaggtagcaacagaaagttagtggatgatgtgaactaacaccgagattaatgaaattgggttttgtctgcaacagaaaaattatatatagtaaagagtgaactatgaatattttgaatattcggttaatttaggtggtaccacgcgtcagcgtcctttatattgataaggatgctggcgcttttttgaaaggagcgtatagaatggatatattttataaaaaaataaaagcaaatgtaacgcccgaagttttagcacaacttcattccaagaagatcattttggaaagtacaaatcaacaacaaactaaaggtcgctattcagttgttatttttgatatttatggcactttaactttagataatgatgtattatcagtaagcactttaaaagaatcgtatcaaatcattgaaagaccgtaccattatttaacgactaaaataaatgaagactaccataatattcaagatgagcaacttaagtcattaccgtttatatctggatatgttgggacgtgtagctttgatttagtaagacatgaatttcctaaattgcaatcaatacaattagaagatcacaagcagcacgatgtaaggttatatatggttgaacaagtttatgtatttgaccattacaaagatgagttatatatcatcgcgacgaatcaattttcaaattcaacaaaatcagatcttgagaatcgagttaataagtctatcgaagacttaactaaaatccaaccattcatgcctacacaagattttgattttaaaactaaagaaattcaatcaaatatttctgaagaaagatttatcgaaatgattcagtatttcaaagagaaaataacagaaggggatatgttccaagttgtgccatcaagaatttacaaatatgcgcatcatgctagtcagcatttaaatcaactttcgtttcaactgtatcaaaatttaaaacgacaaaacccaagtccatatatgtattatcttaatatcgatcaaccatatattgtcggtagttctcccgaaagtttcgtaagtgtcaaagatcaaattgtaacaactaatcctattgcaggtacgattcaacgtggtgagacgacacaaatagataatgagaatatgaaacaactacttaatgatccaaaagaatgcagcgaacatcgtatgctagttgatttaggacgtaatgatattcatagagtaagtaaaatcggtacctcaaaaattactaaattaatggttattgaaaaatatgaacatgttatgcatatcgtaagtgaaatcacaggtaaaataaatcaaaatttatcaccaatgacagttattgcgaatttattaccaacaggtaccgtttcaggtgcaccaaaattacgtgcaattgaaagaatatatgaacaatatccacataaacgaggcgtttatagtggtggtgttggatacataaattgtaatcataacttagattttgctttagcaattcgaacgatgatgatagatgagcagtatatcaacgtagaagctggttgtggcgttgtatatgattctattcctgaaaaagaactgaatgaaacgaaattgaaagctaaaagcttattggaggtgaggccatgatcttagttgtagataattatgattcctttacatataacctagtggatattgttgctcaacatactgacgtcattgttcaatatcctgatgatgataatgtgctgaatcaatcggtggacgctgttattatatctcctggtccagggcatccattagacgatcaacagttaatgaaaatcatatcaacctatcaacacaaacccattttaggtatttgcctaggtgctcaggcactgacttgttattacggtggagaagtcattaaaggcgacaaggttatgcacggaaaagttgatacactaaaggttatatcgcatcatcaacatctgttatatcaagatataccagaacagttttcaattatgagatatcattcattaataagtaaccctgacaattttccagaagaattgaaaattactggacgtaccgaagattgtatacagtcatttgagcataaagaaagaccgcattacggtattcagtaccatcctgaatcatttgctacagactatggtgtcaaaataattacaaatttcattaatctagtgaaggaaggatgaaaaccatgacattactaacaagaataaaaactgaaactatattacttgaaagcgacattaaagagctaatcgatatacttatttctcctagtattggaactgatattaaatatgaattacttagttcctattcggagcgagaaatccaacaacaagaattaacatatattgtacgtagcttaattaatacaatgtatccacatcaaccatgttatgaaggggctatgtgtgtgtgcggcacaggtggtgacaagtcaaatagtttcaacatttcaacgactgttgcttttgttgtagcaagtgctggcgtaaaagttataaaacatggtaataaaagtattacctcaaattcaggtagtacggatttgttaaatcaaatgaacatacaaacaacaactgttgatgatacacctaaccaattaaatgaaaaagaccttgtattcattggtgcaactgaatcatatccaatcatgaagtatatgcaaccagttagaaaaatgattggaaagcctacaatattaaaccttgtgggtccattaattaatccatatcacttaacgtatcaaatggtaggcgtctttgatcctacaaagttaaagttagttgctaaaacgattaaagatttaggtagaaaacgtgcaatcgttttacatggtgcaaatggtatggatgaagcaacactatctggtgataatttgatatatgaattgactgaagatggagaaatcaaaaattacacattaaatgcgactgattatggtttgaaacatgcgccgaatagtgattttaaaggcggttcacctgaagaaaatttagcaatctcccttaatatcttgaatggtaaagatcagtcaagtcgacgtgatgttgtcttactaaatgcgggtttaagcctttatgttgcagagaaagtggataccatcgcagaaggcatagaacttgcaactacattgattgataatggtgaagcattgaaaaaataccatcaaatgagaggtgaataatatgacgattttagcagaaattgttaaatataaacagtcacttttacaaaatggctattatcaagacaaacttaataccttgaaaagtgtgaagattcagaataaaaaatcttttataaacgcaattgagaaagaaccaaagctagcaattattgcagaaattaaatcgaagagtcctacagttaatgacttacctgaacgagatttatcgcaacaaatctcagattatgaaaagtacggtgcaaatgccgtgtccattttaactgatgaaaagtactttggtggtagttttgaaagattacaagcattgacaacaaaaacaacattacccgtattatgcaaagactttattatagacccgcttcaaattgatgttgctaaacaagctggtgcatctatgattttattgatcgttaacatcttatcggataaacaattgaaagatttatataactacgctatatcgcaaaatctagaagtgttaattgaagtacatgatcgccatgaattagaacgtgcctataaggttaatgctaaattgattggtgtaaataacagggacttaaaacgatttgtcacaaatgtggaacatacaaa

SEQ ID NO: 1 - DNA, 2821452 bp, Staphylococcus aureus 04-02981 (residues 1,410,727-2,821,452 of 2,821,452)
tactattttagaaaataaaaaacccaatcatcattatatttctgaaagtggtattcacgatgcatctgatgtaagaaaaatcttgcatagtggtatcgatggcttactaataggtgaggcgcttatgcgttgtgacaatctatctgaatttttaccacaactgaaaatgcaaaaggtgaagtcatgatgaaattgaaattttgtggctttacatcaataaaggatgttacagcggccagtcaattacctattgatgcgataggtttcatccattatgaaaaaagtaaaaggcatcaaacaattacccaaataaaaaagttagcgtctgctgttccaaatcatatcgataaagtatgtgtcatggtaaatcctgatttaacaacaattgaacacgtattaagcaatacgtcaattaacacaatacagttacacggcacagaatctattgattttatacaggaaattaaaaagaaatattcaagcattaaaatcactaaagctttagctgcagatgaaaacataatccaaaacataaataaatataaagggttcgtagatttatttattatcgacacaccctcagtgtcgtatggtggtaccggtcaaacatatgactggactattttgaagcacataaaagacataccttatttgatagcaggaggcattaactctgaaaatattcaaacagttaatcaacttaaattatcacatcaaggttatgatcttgcatcaggtatagaagtaaatgggcgaaaagatatagaaaaaatgacagcaattgtaaatattgtgaaaggagatagagacaatgaataaacaaatacaaacagaagcagatgaattaggtttctttggtgaatatggagggcaatatgttccagaaacattaatgccagcaattattgagttgaaaaaagcttataaagaggcaaaagcagacccagagtttcaaagagaactggaatactatttatcagagtatgtaggacgcgcgacaccacttacatatgctgcatcatatactgaaagcctaggtggcgctaaaatatatttgaaacgagaggatctaaatcatacaggcgcccataaaattaataatgcgttaggtcaagcgttgcttgctaaaagaatgggcaagaagaagcttgttgctgaaactggtgcgggtcaacatggtgtagctagtgctacggttgctgcattatttgatatggaacttgttgtctttatgggaagtgaagatattaaaagacaacaacttaatgtatttagaatggaattacttggtgcaaaggttgtggcagttgaagaaggtcaagggactttatcggatgcagttaataaagcattgcaatattgggtaagtcatgtagatgatacacattatttattaggttctgcattaggtccagacccattcccaacgattgttagagattttcagagtgtcattggtaaagaaataaaatcacagatattgaagaaagaaggtcgacttccggatgcaattgtagcatgtatcggtggtggctcaaatgcaatcggtacattttatccatttattaaagatgatgttgcattatacggtgttgaagccgcaggtcaaggcgaggatactgataaacatgcacttgcaattggcaaaggatcacctggcgtattacatggtactaaaatgtatttaattcaagatgaaggtgggcaagtgcaactagcacattctatttcagcaggacttgattatcctggtattgggcctgaacattcttattaccacgacattggtagagtaacttttgaaaatgcaagtgatacacaagcaatgaatgctttaatcaactttacaaaacatgaaggtattatacctgcaattgaaagtgcacatgcactgagttatgttgaaagactagcgcctacgatgtcgaaagaagatattattgtagtaactatttctggacgtggcgataaagatatggaaacaattagacaatatatggcagagcgaggtcttgcaaatgactaaattatttataccttatattatgggcaataaagatttgattgaaaatgcaacattgttgagtgaaaatggtgcagatataattgaaattggtgtacctttctctgatccggttgctgatggtccagttatcatggaagcaggtcaacaagcgattaaacaaggcatcacgatagattatattttcaatcaattagaaaaacatggtgatcaaattaagtgtaactatgtattaatgacgtattataatattatttgtcattatggagaacaagcgttttttgaaaaatgtcgagatactggtgtctacggcttaattattcctgatttaccatatgaattatcgcagcgtttaaaacaacaatttagtcactatggcgtcaaaatcatatcgttagttgcgatgactactgatgacaaacgtataaaagatatcgtatctcatgcggaaggctttatttatactgtgacgatgaatgcgacaacaggacaaaacggtgcgtttcatccagaattaaaacgaaaaattgagtcaattaaagcgatagccaatgtgccagttgtcgcaggatttggtataagaacaccacaacatgttgcagatataaaagaggttgcagatggcatcgtcattggtagcgaaatcgttaagcgatttaaatctaacacgcgtgaggaaatcattagatatttacaatctatccaacaaacattgaataattaagtttacttgatttaaaaaaattaggcgaatactgtttgaaaaagtgaaaaacggtgaattataaaattgaatagaaatgatacaaaagtaatatgagcaaacccaaacgttcatattactttttttgaaattgtatgcaaaaatctaaatattactataaaagtatacgcaattaaagcgtttatgttttagttttaacattaactattgtatacttatttagattagatttattatttttgacatttgcagaggggaaatagaaaaactgcaaatacggaaatgaaattaattaacgagagacaaataggagtaatgataatgaagtttacaaatttaacagctaaagagtttggtgcctttacagatagcatgccatacagtcatttcacgcaaactgttggccactatgagttaaagcttgctgaaggttatgaaacacatttagtgggaataaaaaacaataataacgaggtcattgcagcttgcttacttactgctgtacctgttatgaaagtgttcaagtatttttattcaaatcgcggtccagtgatcgattatgaaaatcaagaactcgtacactttttctttaatgaattatcaaaatatgttaaaaaacatcgttgtctatacctacatatcgatccatatttaccatatcaatacttgaatcatgatggcgagattacaggtaatgctggtaatgattggttctttgataaaatgagtaacttaggatttgaacatactggattccataaaggatttgatcctgtgctacaaattcgttatcactcagtgttagatttaaaagataaaacagcagatgacatcattaaaaatatggatggacttagaaaaagaaacacgaaaaaagttaaaaagaatggtgttaaagtaagatatttatctgaagaagaactgccaatttttagatcatttatggaagatacgtcagaatcaaaagcttttgctgatcgtgatgacaaattttactacaatcgcttaaaatattacaaagaccgtgtgttagtacctttagcgtatatcaactttgatgaatatattaaagaactaaacgaagagcgtgatattttaaataaagatttaaataaagcgttaaaggatattgaaaaacgtcctgaaaataaaaaagcacacaacaagcgagataacttacaacaacaacttgatgctaatgagcaaaagattgaagaaggtaaacgtctacaagaagaacatggtaatgaattacctatctctgctggtttcttctttatcaacccatttgaagttgtttattatgctggtggtacatcaaatgcattccgtcattttgccggaagttatgcagtgcaatgggaaatgattaattatgcattaaatcatggcattgaccgttataatttctatggtgttagtggtaaatttacagaagatgctgaagatgctggtgtagttaaattcaaaaaaggttacaatgctgaaattattgaatatgttggtgactttattaaaccaattaataaacctgtttacgcagcatataccgcacttaaaaaagttaaagacagaattttttaggaagggaattatcaaaacatgaaatttacagagttaactgttaccgaatttgacaactttgtacaaaatccatcattggaaagtcattatttccaagtaaaagaaaatatagttacccgtgagaatgatggctttgaagtagttttattaggtattaaagacgacaataacaaagtaattgcagcaagccttttctctaaaattcctactatgggaagttatgtttactattcgaatcgtggtccagtaatggatttttcagatttaggattagttgattattatttaaaagagttagataaatattcacagcaacatcaatgtttatatgttaaattagatccgtattggttatatcatctatatgataaagatatcgtgccatttgaaggtcgcgagaaaaatgatgccttagtaaacttgtttaaatcacatggttacgagcatcatggctttacaactgagtatgatacatcgagccaagtacgatggatgggcgtattaaaccttgaaggtaaaacacccgaaacattgaaaaagacatttgatagtcaacgtaaacgtaatattaataaagcgataaactatggtgttaaagtcagattccttgaacgtgatgagttcaatcttttcttagatttatatcgtgaaactgaagagcgtgctggatttgtgtcaaaaacagatgattatttttataactttattgacacatatggagataaagtattagtaccattagcatatattgaccttgatgaatatgtgttaaagttgcaacaggaattgaatgacaaagaaaatcgtcgtgatcaaatgatggcgaaagaaaacaaatcagataaacaaatgaagaaaattgcagaattagataagcaaattgatcatgatcagcatgaattattgaatgcaagtgaattgagcaaaacggacggcccaattctaaaccttgcttctggcgtttattttgcaaatgcatatgaagtgaattatttctctggtggttcatcagaaaaatataatcaatttatgggaccatacatgatgcattggtttatgattaactattgcttcgataatggctatgatcgttataatttctatggtttatcaggtgattttacggaaaacagtgaagattatggcgtataccgctttaaacgtggatttaatgtacaaatcgaagaattaataggggatttctataaaccaattcataaagtgaaatattggttgttcacaacattggataaattacgtaaaaaattaaagaaatagatgtaaatgatgttagggcttatagttattgatactataggctcttttttatgctttttttagcgaaattttaattatttcacactaagaaaaactagtatgtatttgtcaatctaatgtttttcattataatgatgttttattgatttagttttatgattaaaagattatgcaaaacataaaatatatagcgtcatatttgagttttaatgataatatttttataatatataatataaaataatggttatctgagtatgaaatgcaagtaagtgaggtagttaaaaaatgaatcgaattgaaaaacatgccaaaaacacttttattattctgatgctcattatgttattttggatttttatgagttttattttccagaaattattatttccaccttcgaaaaataatttaactacatatgaagcattaaaatattatacacatttaaagggatattacggtttggatcatatatcaaaaggaatagcatacattgcctgtgtgttaattccattcaatttcttttttagattcaatgacatcaaaaaagataataactataataatattataagtacgttattcctattattatactttttagttaatggaatttcgttgattattcaaggattcactgcagaatttacaattagtttaattagtgagtcaaatattcataataatcatgaatttgctgtgaacttatttagatatgtcatacaagaaggtggtatttcttttagtacatatctagtgtgtaacttttctataataatgtggttattcttttcgtgttctttattaaaagaacgaaaaccagttgtcagatgtttaccattaattatatcttgtttaaaattaatattaatcctactatttttactttcaatacttttggtcatatatcaaactcaatctgcacaaatcttatttatttttatagattttctaaattttgtcgcgttaattttagtttatttatgtactaatcctaataatagaggtattgataaaatagcatgtgttaaataaaaagttaatagtaactacaaacatactttactaataatcaaaacgacttatacaaaatcgaagttatataagtccccttatggaatttcacattctagtttacataatatatattataggaagtaatgtgtgtgacgcaaaaggtaccctacatcataatcattatctaatatcgtcacataacttacttatgctataatcatggtattatattgtttggagtgatttgatgagatttgtctttgatattgatggtacgctttgttttgacggccgattaattgaccagactattattgatacattgttacaattacaacatgatggtcatgaacttatatttgcatcagcacgtccgattcgtgatttgttgccagttttaccatcagtatttcatcagcacacattaattggcgcaaatggtgctatgatttcacagcaatcaaagatttctgttatcaaagcaattcatacagatacatatcaccatatcttaaaaataattcaaaagtatgagttagattatattattgatgatgattggaattatgctgcacaacttgacgctgagaacgcgatttttgagcgtttagatccacataagctggccagttgtattgatgttgcaaatatcgacacaccaatcaagatcattttattaaatatagacccggcacaaattacaactatattagacgagctaaataaataccatcaagaattggaaatgattcaccattcaaatgagtataacattgatataacagcgcaaaatattaataaatatactgcattacaatatatatttgatgcagatgttaaatatatagcatttggtaatgaccacaatgatattttcatgttacaacatgctagtagtggctatattataggaccatcagaagcatacacacacgcaatattgaaacttgataaaatcaaacacatcaataataatacacaagctatttgcaaagtcttaaaatcatataaataaaagcacccctatcaaatgataatcattatcaatcgataggggctattttaataaaattcgtcctcgaacatttcttcctcttcatctaatccaaataattctgccatttctccatgttcaattaacatgtttaaatatgcatcgcggagttcttcttcactcatatcattaatcatttctttaagactatcaatccacatatttctgcgtaattgatagtcttcttcaacttcgtttaacatcattatatgtttatttgctgcttctggactagctgtaaagagtaatgcaatcatatgtttacatatcactcgtcttccatcagcatgaggacaattacatttggattttctaggatgttccatatcaatataacaacgatatactttgttgccactgccctttacttcagcctcatgctgcgtttctgaaaatgattttaagttaatgacgcattcactttgataataattaaagcctctttctatagaacgaatacttgcaatatcaagtaatcccattaatgatactcctttttattattatttttaaataaagaaaataaaatcgataagtgtctagattaatatacttgattcatctatattttataacaagtctagaattatcgcattcttaaatagctaatatgaaaatgtttgcactaattcttttgtataagggtgtctatcaacattaaataattcctctattgcaaaatcatcgactatcatgccatccttaagaacgataattctattaactaagcgttgtaacacggataaatcatgagaaataacgataaaatgatttaagttcgtaatcgtttgcgcttttaatatattgattacattttgttcagctataacatctaaatttgaagttatctcatcacatattaaaacgcgaggctgtgctaataacgaacgcatgacattaaatctttgtaattgtccgccactcacttcgcttggtaatttagtcaataattgcgcgtttaactcaaaagtagataaatgttgtaataataattgatcctgagcagtattatcagttaggcctctgtaataatataacgcttcttttaatgaggtctcaatcgtccaatcagggttaaagctagttaaagggtgttggaaaatcgttaacacagcattatcacttaagtaaatttctcctttaacaggtttaaacaagccaagaaccaatgaagcgagcgtacttttaccacagccactttcgcctaaaataccaacattttctccatcaggtatagtaatattgatatcttgtagcaccatctgctttttattataaccaaaagtcacatgttttaactcaatcatagtaatccctctttaattgtgttctatatttaattagacgttcagtatacggatgcaaatgctcatacttgaaatgattaatattacctcgttcaatgatttgaccttcttttaaaacataaatgtactgacaatatttcaatacatgacttaagttatgtgtgataataaataatgtttgaccatgttctaatacaatatgctgtaataaatccatcacttgattaccgttcaaagcatccaatgatgcaactggttcgtctgcaatgattaatttaggctccaacatgagaacgcttgctatgtaaacgcgttcaagttggcccccagaaagttggaaactatatttatttaatatatctttgctttgtaaattaacccacgacaaagccttgtcaatttttgacaaagcctcttctttactacttttataatgcttacgataaatcgcagttaactgtttacctaatttagtatggtcgttaaaactttctgcataattttgagaaatataaccaattgtatgaccataatattgactcaatctactaatattttctccatcaaattggtacgaatcatacgtgcagcttaaatcaaatggtaaatattcaagtaaggctttagcaatcaaacttttcccagcgccgctctctccaatcaaggcattaatctgttgactaaaaattttcaaatcaatccctttaataagatatttctcacaagtattctttattgttaaattttgtatatcaatgagactcatcatattcacctcgttgttttagcaatctatctcttagcgcatctccggttaaattaaaaattaaaatagttatagcaatgactgaagcaggtgcaatcaacataattggatgagacgaaataaaatcacgaccttgttgcaacatagcgccccactctggtgttggcggttgtgcacctaacccaataaatgatagtgaacttatatataaaatgattttaccgaaatcaacgaccatcaaaacgataatagccggtataattttaggtgttaaatgacgtattaatattgttcttgtaggtacatgaaataattgtgccatttttatataaggcttattcatttcgctattaactatacttctagtcaaccttgtgtaattcatccattttattactgtaattgagataactaaattccacaaagatggttgaaaaaagcttgctaaagcaatcatgatgataaattctggaatacttagaccaacatcaataaaccttaacactaatcgttcaatccacccttttttatatccggcaaatagacctagtgtaacacctatgacaacgatagctattaatgttaaaacagtaacaaacaatgttgaacgtgcaccgataataattcgggtaaataaatctctcccataatcatcagttcctaataaatgcaaccaactaataggttcaaaagtttgtgataaattgactttggttgcattttcactactgacaaagaattgcagtacaattaccacaaaaataaatgcaacgaatacaaaaaatatcaggttattctttgaaaatattttatgcatgacggtcactactttctgatatcaatggtgtattggttttgttttttggatttcctaattgtaaacgctgcttcggatcaagtaataacgttaataaatcagcaatcgtattgataataacaacgaagaagccaataaataacacgcatccttgaataacaggataatctcgagatttaatactatccattaatagataaccaataccaggtatatcaaataaattttcaatcactacagtaccacctattagactgccaagtgaaatccctagtaatgggataatcggcaaaattgttggttttagtaaatcatgaattaaaatataacgttcattcataccgcgtaatcttgatgcttgtacgatattactttgcaataacatcaataaattagaacgcactaaacgaatgatgtatgcacacatacctaaagatagcgtgattacaggtaatataaactgacttagtataacgctatctatattcattaaatttgtgacaataaataataaaataataccgataaagaacgctggtaaactaatcgatagtgttgagatcactctaatcactttatccgtccacttatgaaatcgtttggctgctataatgccgagcggtatagatatgcataacgacactactaatgttgaaaatgatatgagtaatgttatgggtgcatagttgaataatatctgtgttaccggttcttttgattcaaaactttttcctaaattaaaatgtaataaatgattcatccaatgccaccactgtaccaataaagaatcatttaatcccaatttatctttggttgcatttatttgttccgtcgacacttgtgctacatcaagatgtaatattttatcaacaggattgcctggtgataatttcattaaaatgaatgtaagtgtagaaataacaaataaaacaactatcatttgcatcagtctatacaacatagactttattatgaacataatagtccccctccttgtgtaagttactaacactttctttttacatgagaatggcgcatgtatatgcaacttacatattaagaaccaacgttcattatagtattatccataaagaaattgaagtatatttaattttttaacaaaatcattataaaatataatattttgaatcaagtcaaccatgtaaaatataaaaaagtcaaaacaaaaacaactatagcactgtattccatctctttcgaaataattgttactgcagtgtaacttaaaagtcgatgattttgtgcatatagttgtcgaatattattttttatctttacggcgaagttcagcgccctcatagccgtatttttcaatttgcttttctaatttacgcgcttttctttctttacgccaatttctagtaaaataccataatagaaaactaattaataaactcataatcgctaaaaatgcagcgtatcctaataatggttgatattttatatcttgaaaatttggaataaaaaatgcaagcacacctaatataacaaatgtaattactgcagatacaaaccatttatttaaaactaagcaacagaatattgttaataaaatcattattaatgttgtgatccataaataattaggcatatcgaataatgtcatattcattctccttttatttcattactttccttgtatacattttattataaatttttaaaaacttaaacaatagcagtcagtttcaagcaatattctatctactattagaaaaatcattgttccttgcgacatggaaatcgtaacattatcgtttaggagacaaaattatgtataatgaatgtattataccaaaggagtgattatatgtctcaaggtttacctttaagagaagatgttcctgtttcagaaacatgggatttagtagacttatttaaagatgatcaacaatattatgaaagtattgacgctctagtacaacaagcaaatcaatttcatcatacatatgcaacaacattaaattcaatcgaacaaattaatactgctttagctgaattagaaaatattttaattgccttagatcgcttaagtaattatgcagaactacgtttaagtgtagatactagtaatatcgaggcacaagtattgagcgctaaattatctactacatacggtaaaattgttagccaattatcatttgtagagtcagaaatacttgaattaccagaagaaatacttcaacaattagaagaatcatgtccatatcaacactatattaaacagttaataaaacaaaagccattccaattatctgcgtcggtagaacaagtattagcaactttatcacctacgctaaacagtccttacgatttatacggcacgacaaaaatgctagatattacattcgattcatttgaacatgatggtacaacgtaccctgtcgactatgctacgtttgaaaatgattatgaagataataaagatcctgagtttagacgtaaaagtttcaaatcgtttagcgatgggattcgaaaatatcagcatactaccgcggctacatataatatgcaagtacaacaagaaaaaattgaagctgatttacgtggatttgaatcagtcatcgattatttattacatagtcaagaagtaacgcgtgatatgtttgaccgtcaaatcgatatgattatgcgtgacttggcaccagttatgcagaaatatgctaaacttttacaacgtattcacggattagataacatgcgttttgaagacttgaagatttctgtagaccctgattatgaaccagagatttcaattgaagactcaaaaaattatattttcggtgcgttaagtgttttaggtgatgactatacaaacatgttacgtgaagcatacgatcagcgatggattgattttgcacaaaataaaggtaaagatacaggcgcattttgtgcaagtccatactttacacattcatatgtgtttatttcttggactggtaaaatggctgaagcatttgtcttagcacatgaattaggtcatgcaggtcattttacattagctcaaaaacatcaaccatatcttgaatcagaagcatcaatgtactttgttgaagccccttctacaatgaatgaaatgttgatggccaattatttatttaacacaagtgataatccaagatttaagcgttgggttattggctcaattttatctagaacatattatcataatatggttacccatttattagaagctgcttatcaacgtgaagtgtatcacaaagtagatcaaggtgaatctttaaatgcgccgacattaaatgaaataatgctaaatgtttataaacaattttttggagatgcagtagacatgactgagggtgctgaattaacatggatgcgtcaacctcattactatatgggattatattcgtatacgtattctgctggcttaacaatcggaactgtcgtttctcaaaagattaaaaatgaaggccaaccagctgttgatgcttggttagaaacattgaaaaaaggtggtagtgtatcacctgtcgaacttgcaaacattgcaggtgtagacattactacagaacagccacttaaatctacaattcaatatatttctgatttagtcgatgaagttgaaaaattaacagatgaaattgagcaagcaaataactaagatgcgagacaatttatagtagaacaatataaaccaagattttcacattactaattgtgagaatcttggtttttttgagggtttatgaatgatagaaatatatatttatcgtaagggattttatagtaataactttaagttattgttcgtaatgtgtacctgttaaataaaaataaacactttcagcgatgttaataatatgatcaccaatacgttctaaatgtcttgctgctaaatgagcttgtgcagcgacaaatggatcgttatcaataagatacgttgcgttaataatatgactatataagtcatcgatatcttcatcacgctcaattatttctcttattaatacggtatctttctttttaaatgcttgatctaagtcctttaacattaacatagctaatttacccattgtctttaaacgggttaacacataatcatctgtaatctttgtacgcaatcgaatattggcaatactcgatgcattatctcctattctttctaaatcggaggcgatttttaatgaagaaatcatcatacgcaaatcactcgcaatgggctgttgctttgtaattaacatgataactcgctcattaatatcataatttaattgattgatatgtttatcgtttttaactgtttgtcgtgcaaagcctctatcgtcaatacttaatgattttataccattttcaatactcacatagacatttgcacctaaccgacgtaattcctttattaaatcatcaagttgctcctgatatcgctgtctaattattgccattatatatcaaccaaaccttcctgaaatataatcttctgttttcttgtttgatgggttagagaaaattttatcagtatcatcatattcattgacataaccatttaagaaaaatgcagttttatctgatacacgagctgcttgttgcatattatgtgtaaccataataattgtatacttttcttttagttcttgaaccaactcttctactcttaatgttgagattggatctaatgctgatgtcggttcatccattaaaatgacttcaggttcaattgctaaacaacgcgcgatacaaacacgttgttgttgcccaccggataaactatatgcatttgtgtgcaacctatcctttaattcatcccaaattgcagcgccacgtaatgatttctcaacgatttcatcaagaacttttttatttttaataccgtgaatctttggaccgtaagtaatattatcgtatattgattttggaaatggattaggttgttgaaagaccatgcccacatttgtacgtaattgttctttagaatatttttgatcaaaaatgtcttgatctcgatataatattttaccagctgttttcacagaaggtactaactcaaccattcgattcaaagttttaatatatgttgatttgccacaaccagatggacctataatggcagtaatttggttttcataaatatctaaattaatattttgtaatgcatgattttcgccataccataagtctaaattttgtgttgaatatataacagaatgtgagtttgtatcatctggtgttttatgatgactttgtgagacatcaaacgtatgactttgagatatttgtttagtttgtgcaagtgtttgcgccatatttaaaactccctttttaatagataaatgagattgattgtttaaattagaattttttactaaatttgttacgtaaaataatcgcaacgccattcattaagattaagataactagtaaaacgataatgcctgccgatgcaacattctggaattcttcttgaggcattttcgcccaagtaaatatttggattggtaatgctgaaaattgatccaatatacttctaggtgttgccaataatatagtcggtataccgattagcacaagtggcgctgtttctcccagtgctcttgaaagagacaaaatgaatccagttaaaataccaggtaacgctgctggtaagacaacacgtcttatcgtttgccatttattagcacctaaaccataagaagcttcgcgtactgagttaggtacagctctaattgcttcctgacttgaaacaataataattggtaatatcagtaaggtcattgttagcgctgctgccaatatactgttacccattttcaaggcttcaatccccgcaccaccaacgaacaaagtgtaacctaataacccaaatacaactgatggtacaccagctaaattggaaatactgattttaacaaactgagtaaatttgttgtttttcgcatattcttctaagtatatagctgtacctattcctaggatgattgataatggaatgatacttaacattaaccaaagtgaaccgattaacgcgcctttaacgccagccatagatggtgttgaagaagaaaaattagtgaaaaactgtaaatttaaatgacttacccctttaatcaatgtttgagttaacaacgcaataagtacgacaagtcctaataatgtacatgctaaaaatatgagtttgaacactttatttttaaccgttctggatgataaatgtttttggacaagttgttgatcgacgagtgattgtctattattatctgtcgtttccatattaatactcctccctaaaacgcttagaaatccactgagaaagtaaattcatgattaaggtaaagataaatagtgtgaaccctacagcataaatactgtaataaatatttgatccaaatgttgcatcacctgtcgctatctcaacaatatatccagtcattgtttgaatcgaacttgttaaacttaatgaagctgttggcgaactacctgccgctaatgatacaatcatcgtttctccaattgctcttgaaatcgcgagaacgattgaagctacaatacctgatgttgctgcgggaagtacgactttagttgctacttctaatttagttgctccaagtccataggcaccttctcgaattttatttggtacagatgccattgcatcctcactcaaacttgtgatgagagggacaatcataataccgacaactaagccgggacttatagcattaaactctccaagacctgatatgaaagatcttaatactggtgtaacaaaggttaatgcaaagaaaccaaacacaattgttggtattcctgctaaaatttctaatatcggtttaattatgcgtcgtgcacggtcacttgcatattcacttaaataaattgctgcaccaagcccgactggaactgcaaatatagtcgcaataactgtgatttttaaagtccctattatcaatgcccagataccaaacttagggtctgaaccggtaggattccaagtagtagaaaatagaaattcagttattggaattctggtgaaaaaagtgatggtttctaaaagcaatgtgattaatatacctagtgttgttaaaatggaaatcgctgaaattgcggctaaaataactggtataattttgtcattatgcttcccttttttattaatatttttttcgattaaagctttaacattagtagatgaagtcataatcaaacctctttctattactcccaaaataattagatttgtaaaataatgatgaaccactattttaagttgataagcttgtagactaactgaatgtcaaaatcagcgtctcgataaatcaagctttgtactctaaataatgattcaccatcaaaatcatgtttcaagacacatttgaaattgcgtcttattattttttgtcttcagactttttatcatcagatttcttgtcgtctgatttttgatttttatcaataaatgcttttaaatcatctaattgtgatttgtatgttttctctggtgctgctacatatccagcttcttcagctgctttacctttatcttctaagacgaatttgataaattctgacattactttattatctttcaatgctttttcatttacataaatgaataatggtctacttaatgcataagagttatcttgaattgtttttttcgtaggctctgttgctttaccattttcatctttgattttaacttcttttaatttatctttattttgtacgtagaagttatatccaaagtatccgattccctctttgtttttcgttacagaagaaacgatagcatttgtatcagcatttttttctgctttaatatcttctttattcattacttcattttcgaagaagtcataagtaccatgacttgagtttggtgatacagcatttatttttttatctggccatttactattaacatctttccatgttttagcttttccagaataaattgcttttaattgctgtttgtctaattcatctacaaaatcattttctttatttacagcaaccgttacaccatcttgcgcaattttaaattctttgtatttgatattcttatcttgtaatttttgcttctcttcatctttaattggtctagaagcatcagcgaagtcgatatctcctgcaatgaatttttggaaaccagcacctgtaccagcttgtcctgctgagattttagcatccgagtgatcttgagcccatttttcatttaatttctccacaattggtgctactgttgatgagccatcacctttagcttccccttttaaatcactattaccactgccaccattaccgccaccacaagcacctaataatagtgttgcacctaaagctgtagtaccaacaaattgccattttttcattgaaatatcctccctgtatgaacaacaaatagtatttgtattgattacatctttatcttaaccttgaattattaacctcatttttagaaactgtaaatgttacataaaaatttgttaagaaaatgtaaatattaatttttgttaatctaaaaaatattgcttcattagtaaaattaaaatgcttcctgaaaaattatcgaaatttaaatatgtacacaaaaaatgaggctgggacataaatccctaaaaaaacagcagtaagataattttcaattagaaaatatcttactgctgttctctatttatacaatacttcgtattgaatggcttcgctttgcccgtctggcacattactgtaaaattctataaatagaatttttgatgacgggtcccttcctatggtgccgtctcagccaccccaaccggcacattgttgtaagctgactatatgtcagcttctgtgttggggcccctgtcttcgactggcactgctccctcaggagtctcgccattaatactacgtattaacatgtaattttactttgaaatacattaaagcccaaattaatcaaaagctttctgaaccagaaacgaaaaaaatctatagtcatagaaaaatttatgtagagcctgtttttggatttatgaaggttattttgggtttcactcgaatgtcagttcgaggaataaataaagttaaacgagagctaggttttgtattaatggcacttaatataaggaaaatagcagctcaacgagctgtacattataaaatacatatcaaaaaagctaatttccatcaaataattaatagaaatcagcttttttacattgcctaagaacttaatgtcccagcctattcgtttgaattatttaattttttactttgaaaggaatgtttaaaaaactacttcatctgtccgacttaatattgaatataaaaaacacgcatcctacgacacgtgtaaaaatgattattcttttgagtcaattcgactccaaccttttttagttaaagtgattttacctgtttctatattaataatcttctgtttatataagtgaccgattgcacgtttgaatgaacctttactcatattgaatacttctttaatcgcttcagggcttgatttgtcccagaatggtaattcaccatcatattcaactagtaaatcaaagatgacttggccgtcatcgtctaaacgttcatgtgcaagtggtaaaaatgaaccatttaactcacctttatcattatgcccgataattctaacttgaacagattcacctaatcttggttcagctttacgttctgattcatgtacgaaaattttgtaacctgattcgcttaataagaagctaccaattcgtaatacgcggtaaggtttggcttcaatgacttcgttttttaaattatcatcgtgtacaggtgtaaacatattttctacaacagattcactcgctaaacgtccatacatatgattctcacggtcaattcgtaatgtaactagcaaatgatcaccaggttgtggccatagtgatttcacttttggtaaatcttcccatggtactaacacttcacggggtaaaccaacatctatacgtgccccatcgcgatccgttttaagtactttagcaaaatcatatttatctttcgtaatatcaggcatattttgagttgcaaataattcacctgaacggtttggataaatgaagaaactatattcttcacctacttctaattcatcatcatcgttcatttctgattggtttaactttacgttttcaccgtttggtccttttaaaaggtaagttgagccttgtaaccctactacttcaaggaattctatagaacctactatatctttgtctaatgccatgttattctccttcgattcttgtattctttattattataacatgtgtgagtcattctatcattacaacttatatgaggtcgaaactgtgacgataatatgatataattcttccgttagaatatcgaatgaaaaaaaggagaaaatgcatgttacaagtaactgatgtgagtttacgttttggagatcgtaaactatttgaagatgtaaatattaaatttacagaaggtaattgttatggattaattggtgcgaatggtgcaggtaaatcaacattcttaaaaatattatctggtgaattagattctcaaacaggacatgtttcattaggtaaaaatgaacgtctagctgttttaaaacaggaccactatgcttatgaagatgaacgcgtgcttgatgttgtaattaaaggtcacgaacgtctttatgaggttatgaaagaaaaagatgaaatctatatgaagccagatttcagtgatgaagatggtatccgtgctgctgaacttgaaggtgaatttgcagaaatgaatggttggaatgctgaagctgatgctgctaaccttttatctggtttaggtatcgatccaactttacacgataaaaaaatggctgaattagaaaacaaccaaaaaattaaagtattattagcgcaaagtttattcggtgaaccagacgtactattactggatgagcctactaacggtctcgatattccagcaatcagttggttagaagatttcttaattaactttgataatactgttatcgtagtatcgcatgaccgtcatttcttaaataatgtatgtactcatatcgctgatttagacttcggtaaaattaaagtttatgttggtaactatgatttttggtatcaatctagtcagttagctcaaaagatggctcaagaacaaaacaagaaaaaagaagaaaaaatgaaagagttacaggactttattgcacgtttctcagctaacgcttctaaatctaaacaagcaacaagtcgtaaaaaacaacttgagaaaattgaattagatgatattcaaccatcatcaagaagatatcctttcgttaaattcacgcctgagcgtgagattggtaacgacttattaatcgttcaaaatctttctaaaacaattgacggcgaaaaagtattagataatgtatcattcacaatgaatccaaatgataaagcgattttaattggagatagtgaaattgcaaaaacaacattacttaaaatattagctggcgaaatggaaccagacgaaggttcatttaaatggggtgttactacatcattaagttacttccctaaagataactcagagttctttgagggtgtaaatatgaatctcgttgattggttaagacaatatgctcctgaagatgaacaaacagaaacatttttacgtggtttcttaggtcgtatgttatttagtggtgaagaagttaagaaaaaagctagtgtgctttcaggtggagaaaaagtacgttgtatgctaagtaaaatgatgttatcaagtgcgaatgtacttttacttgacgaacctactaaccacttagacttagaaagtattactgctgtcaatgatggtcttaaatcatttaaaggttctatcatctttacttcttatgacttcgaatttatcaacacgattgcaaaccgtgttatcgatttaaataaacaaggcggcgtttcaaaagaaattccatatgaagaatacttgcaagaaatcggcgttttaaaataaacataatatgtagaatttcttttcgaaaatctctgtattgaggcccgaccaacttgcacattattgtaagttggcttactgtcaccttctatattgggacttattccgcaacttgtattgtttgtagaaattaggaatccaatttctctatgtgttgcaccgacaaggattgaaaaaagctagctacaaagtcattttcattcagtcaactactgtcaatataacattgcagggtctagggcattgattcatgcccgagactatattcaatttaatagacattaactggtcgtgaggctgggacataaatccctaaaaaaacagcagtaagataattttcaattagaaaatatcttactgctgttctctatttatacaatacttcgtattgaatggcttcgctttgcccgtctggcacattactgtaaaattctataaatagaatttttgatgacgggtcccttcctagggtgccgtctcagcctctttttacattgcctaagaacttaatatcccagcctcgtgtcctttttattttattttttagcacatcagcacagtgaacaccccttctctaaattacaaatacagttatcaccgcattaaaagagtacatttatttaatgtgcatattgagtatgctataagtattttgaattttatttttcaaaaagtctcattatcaccaccttttaaaatataagcaacgctataacttgaattttcaggttattccaaaaaatctaaattatcggtttacattcatatttgtcatatgtataatgaacacataccaatttaataatattttgatgaggcgcatcaatcatgagtaaagtttagattactgtctgctaacagctgaatttgaaagggtgcgatgccgaagcgattataatagcagttataatttgttggactttttggttaagagctgagagtttgtcattatttaaaaataatggagtgcatcacttgtatatagattaagagcaagttcgcattccgaacttgttctttttttattattgtgtgcccttcctaacaattaggaggattatatggtaacaagaagtgtgttgaaatttggcggatcatccgtcagtgattttacaaaaataaaaaggatcgctgaaatgttaaaggagcgagtcaatcaagatgaacaattaattgtcgttgtaagtgctatgggtaacacaacagatcaattaatgacgaatgtatcgaccttgactaaagcaccaaaacaacaagaactggcattattattgacaaccggagagcaacaaactgtatcttatttatcaatggtattaaatgatatcggtgtgaatgccaaagcaatgactggctatcaagcgggtattaaaaccattggccatcatttaaaaagtaaaattgctcaaattaatcctcaaacatttgaacaagcctttcaagaaaacgatattttagtagttgctggatttcaaggcatcaatgaacatcaggaattaacaactttaggcagaggcggttctgatacgaccgctgtgtcacttgctgttagtaatcaaataccttgtgaaatttataccgacgttgatggtgtgtatgccactgacccaagacttttaccaaaggctaaacgactagacatcgtctcatatgaagaaatgatggaaatgagcgctttaggtgctggtgtacttgaaacaagaagtgttgaattagctaaaaactataatatccctttatatttaggaaaaactttatcgaacgtgaaaggaacatggattatgtcaaatgaagaaatattagagaaaaaagcagttactggtgtggctttggataaacatatgatgcatgtaacaattagttatcccctacctgacaatcagctacttacccaactatttacggaacttgaagaaggtgctgtaaatgttgatatgatttcacaaatcgtcaacttggatgggctacaactatccttcacgattaaagatagtgattttcatcaaatttctatgattcttgaaacattaaagaatcaatatgaagcattagcttataaaatcaatgagcattatgtcaaaatttcattaattggctcaggcatgcgtgatatgtcaggtgtggcatcaaaagcatttttgacattaattgaaaataatatacctttctaccaaacaacaacatctgaaataagtatttcatacgtcattgatgattttaatgggcaacaagcggtagaaaaactatatgacgcatttaacatttaatggtaaaatgattgttaaaatattctaaaaattggaaattattataaaatggagtgacaagttatgacaaagttagcagttgtgggtgcaacaggattagtaggcacaaaaatgttggagacattaaatcgtaaaaatattcctttcgatgaattagtattattttcatcagcacgttctgcagggcaagaagttgaatttcaagaaaaaacatatacagtacaagaattaactgatgctcgtgctagtgaacatttcgattatgtattaatgagtgctggtggcggtacaagcgaacactttgccccactctttgaaaaagctggtgcaatcgttatagacaattcaagtcaatggcgtatggcagaagatattgatttaatcgttccggaagtcaatgaacctacatttacaagaggtatcattgccaatccaaactgctctacgattcaatctgttgtgccattaaaagtattgcaagatgcttatggtttaaaacgagtggcatatacaacatatcaagctgtatcaggttcagggatgaaaggtaagaaagatttagctgaaggtgtaaatggtaaagcaccagaagcatatccacatccaatttataataatgtgttaccgcatattgatgtgtttttagaaaacggatatacaaaagaagaacaaaaaatgattgatgagacgagaaaaattttaaatgcgccagacttaaaagtaacagcaacatgcgcacgtgtgcctgttcaagatagtcatagtgttgaaattgatgtaacgcttgacaaagaaacgacagcagaagatattaaagcgttatttgatcaagatgaccgcgttgttttagtagacaatccagagaacaatgaatatccaatggcaatcaattccactaataaagatgaagtgtttgttggccgtatacgtagagatgattcattagaaaatactttccatgtatggtgtacatcagacaatttattaaaaggtgctgcattaaatgctgtacaagtattggaacaagttatgcgtttaaaaggagcgaattaaaatgacacatttatttgagggtgttggcgttgcacttacaaccccttttacaaataacaaagttaatcttgaagctttgaaagcacacgttaattttttactagaaaataatgcccaagcaatcatcgttaatggaactactgctgagagccctactttaacaacagatgaaaaagaacgcattctaaaaacagttattgatcttgtagataaacgtgttcctgtcatagctggaactggaactaatgatactgaaaagtcaatccaagcttcattccaagctaaagccttaggggctgatgcaattatgttaattacgccctactacaacaaaacgaaccaacgtggtttagtcaaacactttgaagcgattacagatgctgtgaaattaccagtcgtgctgtacaatgttccttcaagaacgaacatgacaattgaaccagaaactgtagaaatattaagtcaacatccttatatagttgctttaaaagatgctacgaatgattttgagtatttagaagaagtgaaaaagcgaattgatacaaattcatttgcattatatagtggcaatgatgacaacgtcgtcgaatactatcaacgtggcggtcaaggggttatctctgttattgccaatgtcattcctaaagaatttcaagcgttatacgatgctcaacaaagtggattagatattcaagatcaatttaaaccaatcggcacactgttatcagccctatcagttgatattaacccaattcctattaaagctttaacaagttatttagaatttggaaactatgaattacgtttaccattggttagcctagaagatacagatactaaagtgcttcgtgaagcatatgacacatttaaagcgggtgaaaatgagtgaaaatattactaattggctatggtgcaatgaatcaacgcgttgctagattagcagaagaaaaaggacatgaaatcgttggggtcattgaaaatacaccgaaagcaacaacgccatatcaacaatatcaacatattgcagatgttaaagatgccgatgttgcaatagatttttcaaatccgaatctattattcccattattagatgaagagtttcatttgccattagttgtggcaacaactggcgagaaagaaaaactacttaataagttagatgaattgagtcaaaatatacctgtatttttcagcgcgaacatgagttatggcgttcatgcactgactaaaattttagcagctgctgttcccctacttgatgatttcgacatcgaattgactgaggcacatcataataaaaaagtagatgcaccaagtggtacgttagaaaaattgtatgatgtgatcgtatctttgaaagaaaatgtaacacctgtgtatgatagacatgaattaaatgaaaaacgccagccacaagatattggtatacattctattcgtggaggtacgattgtcggtgaacatgaagttctatttgctggcactgatgaaacgattcaaatcacacatcgtgcacaatcaaaagatatttttgcgaatggtgctatacaagcagcagaacgcttagttaataaaccaaacggcttttatacgtttgacaacttataaacatattaaaggagatcgattattttatggtacaacatttaacagctgaagaaattattcaatatataagtgatgctaaaaagtctacaccaataaaagtatatttaaatggtaattttgaaggcatcacatacccagaaagttttaaagtatttggttcagaacaatctaaagtaatcttttgtgaagcggatgattggaaacctttttacgaagcatatggtagtcaattcgaagatatagaaattgaaatggatcgtcgcaattctgccattccattaaaagacttaacaaatacgaatgcacgtattgaaccaggtgcatttattagagaacaagccattattgaagatggtgctgtcgttatgatgggcgcaacaattaatattggcgcagtcgttggcgaaggtacaatgattgatatgaatgctactctcggtggtcgtgctacaactggtaaaaatgtacatgtaggggctggcgcagtattggcaggtgtgattgaaccccctagtgcatcaccagttataatcgaggatgatgtattaatcggtgcaaatgcagttattttagaaggtgtacgtgttggtaaaggtgctattgttgcagctggcgcgattgtgacacaagatgtaccagctggtgcagttgttgctggtacacctgcaaaagtgattaagcaagcttctgaagtacaagatactaaaaaagagattgtagcagcattaagaaaactgaatgactagtgacgtcaacgtataataatttcaaggttgagatacgattatgtctcaaccttattgtttatcattgaataaacttatgatcacaaatttcgaaatacgttacactatttatatagtaatttaacacaaaggattgataattatgaatgaattagaatttgttacgaaacatcgccgtcatttacatcaacatcctgaattaagcttacatgaatttgaaacaactgcttatattaaagcgtttttagatagtttaaatattaaatacgattgcccattggaaactggcgtcattgcatacttagaaggtaatggctcacatacgatagcgtatagagctgatattgatgcgttacctattttagaggaaaatgatgtgccttatcgcagtcaatctgatcatgtgatgcatgcttgtggacatgatggtcatacaactgcattaatgctttttgtacaacgttgcaaagacatgcaagacgcaggtcaattaccgcaaaatgtcgttttcattttccaacctgcagaagaaactggtggcggtgcaaatcgattaataaaagccggtgcctttgataagtatccaattgaagcggtatttggtattcatgttaacccatttgctgatgaaggcattgcagtgataagagatgaagaaattacggccagcgcaacagagtatcgctttttcttaacaggcctgtcaagtcatgttgctgataaagaacaagctcattcttgtggtgaagcattacaacatgtattaactcaaatatcacaaattcaacaatttcaccttaacggtttgaaacgaaatattgttcatattggtcattttaaagctggtgaagcgattaacactgtaccaagtaatggttatttagaaggtacaattcgtacatatgatattgatgatttaacaatcgttaaaaatcaaatgcacaagatagcagaaagtgtcaagcttctgtttaatgtagaatgtgaagttaaatttgcagaaggttatccccctacaatcaatagtccgaaattacgtactcaaatagaggacgccttaataaaagctgatttaaatgtctatgacaaaccaacgccattcttatttggggaagattttagtttttatggtcaacaactagctccagcttactttgtttttataggaacacgaaatgaagataaaggttttgtaactggtttgcacacatcacatttaaattttgatgaaaaagcgttaataaacgtggttaatttttacgaaaatttattaaataattacaaagaggtgtaatacattgacagcaacatggtctgtaaataagaaaatatttttacaaaatgcaatcacagtcaaaaacaatcagccattaatggcagttgttaaaaataatgcatatcactatgacctagaatttgctgtaactcagtttatccatgcaggtatagatacatttagcacaacatcactacgagaagcaattcaaattagacaacttgctccagatgcaacaatctttttaatgaatgcagtttacgagtttgatttagtccgtgaacatcaaatacacatgactttgccgtcgttgacatattactataaccataaaaatgatttagcaggtattcatgttcacttagaatttgaaaatttattacatcggtctggatttaaagatttaaacgaaattaaagaagtattgaaagatcaccatcataatcaaaatgcaaaaatgattattagtggtttatggacccattttggatatgctgatgaattcgatgtgtcagattataatgttgaacgttcacaatggatggaaattgttgaagcacttttatctgaaggttatcagttcgacctaatccatgctcaaaatagtgcgagtttttatcgggaaggacaaatattactaccccaccatacacatgcgcgtgtaggtattgcgttatacggttcaagaccatatagttcactgaatcaacatgatatagttcagtcattaactgtaaaagcacatgttattcaagtgcgcgaagtacaagctggtgattattgcggttatagctttgcctttgaagtgactaaaaacaatacaaaattagctgtagttgatatcggttatggcgatggaattttaagaactcgtgctaaacatgaagcacttatcaatggtaaacgctacccgatacgtgcattaatgatgagccatatgtttgttgaagtagatggcaatgtacatgcacaagatgaagttattctttataataatgatatccgcatcgatgaatatacctttaaaggtgttggtgcaaattctgaacaattaagtgctatgaatcatgattctttaaaaaaggagtacatttcaaatgactgttaaatataatcaaaatggcgaattaacaatggatggtattagtttaaaaacgattgcacaaagctttggtacacctaccattgtttatgatgaactacaaattagagaacagatgcgccgttaccatcgcgcatttaaagatagtggattaaaatacaatatttcatacgcctcaaaggcatttacttgcattcaaatggtcaaacttgtagctgaggaagatttacagttagatgttgtttctgaaggtgaattatatacagctttagaagcaggttttgaaccgagtcgcatccatttccatggtaacaataaaacgaaacatgaaattaggtatgctttagaaaataatatcggttattttgttatagattcattagaagaaattgaattaatagaccgctatgctaatgatacggttcaagttgtattacgagttaatccaggtgttgaagcacatacacacgaatttattcaaactgggcaagaagatagtaagtttggattatcaattcaatatggcttagctaaaaaagcaattgacaaagtccaacaatctaaacacttaaaattaaaaggtgtacattgtcatattggttcacagattgaaggtacagaagcatttattgaaactgctaaaattgttttacgttggcttaaagagcaaggcattcaagttgaattattaaaccttggtggtggctttggtattaaatatgttgaaggtgacgaaagtttccctatcgaaagtggtattaaagatattacagacgcaataaaatccgaaattaaagttctaggtatagatgcaccagaaataggtattgaaccgggacgatcaattgtaggtgaagctggcgttactttatatgaagttggaaccattaaagaaattccagagattaataaatatgtttcaatcgatggcggtatgagtgatcatatcagaactgcactttatgacgcaaagtatcaagcattgcttgttaatagaaatgaagaagcagatgacagtgtaactatagctggaaaattatgtgagtctggtgatatcattattaaagacgctaaattaccttcatcagtcaaacgtggagactatcttgctatattatcaactggtgcatatcattactctatggcatccaattacaatcaaatgcaaaagccttctgtgtttttcttaaaagatggcaaagcacgtgaagttataaagcgacaatcgttaagacaactcattattaatgatacaaaataaaaataaacaaagtaatccccgaagcacagaaaattatactgtgactcggggaatttttatgcattatagatgactgtagaaaacatgcttggacatatactctaaaaaaggaagaacagcacatttttagttagaaagtatttatttctttttgtcattaatcctttatatttagttagccctattcaactaatttaaagcatcatatacataccacactttaaacaagcatcatgaaattagattttatgctttacttgctttttcaaataatataaaacgataagaattaacaacaaatataatgtataaaacagaatttcatcaaatccaaaatctttacttgtaattaatacatcaatatcttctaattccatcatctctgctttaatataattattaaactttggcaaagtcattaaatgtacattgtaaatatagtaataaaagtcgataaatatgatgttaaaaaatatgtatgttttatcaatattagttttgaaaaatagtatcccagaaatcattatcggaatcactaatacaatcatcattgctgctaaaatattaatatttaatccaattgcagataatacaccgaaaactaataaattagcaactaaactaaggataagatatttcataaaatcacctcgtcgttgtacaccataattatattatataaatataattttctattgcaaacaatgttggtgatataaaaaaagagttctcaatttggctgagaaactcatcgcgttaagtatttgtaataagcatataaaaacaccttacttcttggtaaggtgttagttaaaatcaatgattcaaatctaagaattatagtttaacaacgtttgcagcttgtggaccgcggtcgccttcaactacttcaaactcaacagcttgaccttcttctaatgatttgtaaccatcttggttaattgctgaaaaatgtacgaatacgtcattttctccttcaacttcgataaagccgaatcctttttcagcgttaaaccatttaactgtaccttgtttcataatctgaaacctccaagactaaaattcattcaatatgcttattcgcatattacaaaaaatacatgcaaatttcactcaaatattctttgcaatatggaataatcatctgcttaacttgtattatagtgcagttattaccaaattgcaatacaataataaaaaatattcatttaatcaattattggtagtttataatatacttcattattttgtaaaacaatgaaactataaaatatttgtaaatcctcttcacaatcttcgcaatagttcatgtcacaattattataaaatgcataaatattatatttgcctgtgacataattatcgaactgaactttacattgattaatcaattgttgatagtgcttaaacatgtcatcaaaatcttgatattgatatttttcaacaatgttttctggccagtcactgaataaccaccatccctcataatcggctctaattttggtaactgtccacattattaaagaccccttccatacttcaaaaactctatacttatttttatacctttatcctctgaaaatcaagtttgacgacttgaaacaaacaaagtagtaactatagtaattattagtttttttaagtaaaactacgtataataacattatgaggtggtaaaaatgagacatatacatttacaagtattcggacgcgttcaaggcgtcggatttagatattttacacaacgcattgcaatgaactataacattgtcggtactgttcaaaatgtagatgactatgtagagatatatgcacaaggggatgacgcagatatagagagatttattcaaggtgtaattgaaggtgcctcaccagcatcaaatgtaacaagccatcaacttgaagagttagaactaaatcaaaaattatcggattttcgatcaatataaaatgctaaataaaggaagatgacagtgagatataatatttctcatatatttggggtgttagtgggaattcctgtagcgtttttaacaagcatatttgggatgattgcacttgatgtatcttttttaattgatatgtctattggtattgttggctttttaatgacatacctaccgatacaaaaactcacttcacgcaaatatttaaacgaaattggtttgactagaaaagactatcgctatattcgaaatcagttaaatcatacacaccaaaaacttagaggtattttaaaaacgtatgtcaatataagatcaattaaagattttaggcagattaatgatatataccaaatttcacgttctatttatacgacagttagacagagacctgcatcattttataaagttgaaggctttttttattctcatattgataatgctttaaatttggttgatgcatatacacgtctagcaaaaatgcccaaaaaatcaattaatgaacagcaaaagttagaacaaacacgaattactttggatgaggtcaaacgaacattaatcgctgatttaaagcgtctcaacgaagatgattatgaacgtttagatattgaaatggaattaaataagttacatcaaaaacatcatcaagattgatgtaaaatagcaactattggagagatgattgatgactgaaaataaaagtttcaaagaaagccatccactagatgattttataagcgataaagaattatcgaatactactattcaaaaagaaaagttaacaattgaacaacaaaaacaggtagacacaatcagtaaacaaattaaccctttagacaatgaaggtttattagcgtttggttctgatttacagaaacaaatgtctcaattttcacatcaaatgttggatgaagtacaaagtaaagatgttggtcctattggagatactttgtcagatctaatgtcaaaactaaagtcagttaatccaaatgagttaaatactgataaaccatctatgttaaaaagaatttttagcagagcaaagtcgtctatcaatgaaatcttttcaagaatgcaatcagttagtgctcaagtcgatcgcataacgattcaactgcagaaacatcaaacacatttaacaagagatattgaattattagatacgctatatgataaaaacaaacaatactttgatgacttatcattgcatatcattgctgcacagcaaaaaaagttgcaattagaaaatgaaaagctaccacaattgcaacagcaagcgcagcaatccactaatcaaatggatattcaacaagttgcagatatgcagcaatttatagatagactagataaacgcatatatgacttacagctttcaagacaaatagctttgcaaactgcgccacaaattcgtatgattcaaaatgttaatcaagcacttgccgagaagatacaaagttcaattttgacaagtattccactatggaaaaatcaaatggccattgcgcttacattaatgagacagcgtaatgcagttgctgcacaacgagctgtcactgatacaactaatgatttattaacagcaaatgctgaaatgttgaaacaaaatgcgattgaaactgcaacagaaaatgagcgtggcattgttgatcttgatacattgaaacgtacacagcgtaacattattgagacaattgaagaaacattaattattcaacaacacggtcgcgaagaacgacaattagctgaaaaagaattacaacaattagaacaagatttaaagtcacatttagtgaacatcaaaggaccgaataaacaatcataaattacgaattagatataacaaaaaggaagcatcctacgattaaattggagatgcttccttttatattattcgttattcctgttgatatttaattggatcttgttttacaaatatgccgactagatagcctaatatcgttgcaataattgctactgggaaccactctaaagaatacgctcttagaggcaatgattctataaagttaattttcagccaacctaacttactaataacactgaaaatcgacaatataaatacgataataactggaatttgttgtgaaatgcgttttgtcggtatgaatttggcaattaaaattaataatacaacagttattgctactgggtatacaatgcttaataccggaattgacattgagataacagcatttaaaccttggttagcaataataaaactcattaaaatgaaaactaatacaaatgctttgtatgatactttaggtacgattctatggaaatattcagaaactgcaacaataagcccgcatgctgtagttagacatgccagcgccacaatgatgcccaataaatattttccgaatgaaccaaatcctgttgaagccattgtcgttaataaatatgtcccaatgtttcgatctttggatttcaattgatctaacgtcatgtcacttactggcatatgattaccaatataacctaatgaaatatatatgaaaattaaagctacggctgcaattaaaccagcagtcaaagtttgtttgaatatttgatttgttttagtaatgcctgttagttttactgcattaacaacaatcattgaaaaagcaattgctgcaatggcatccattgttaaatagccttgtgtaaagccttcagcaaaacttgaaaaattagaatgatatagtgcttcattgccctttccagcactattaccgctaaagtctaagtatcctttaataatcatcgctaaaatagtaatcaataataatggtgttaataatgaaccaatacgatcgattaacttagatggatttaaacaaatatacaaaacgactatgaagtagataatcgtaaatataaataaagcgatactactattgctatgtataattggtgtaattgtcatttcaaaagatgtagatgcagttctaggtattgcgaaaagtggtcctatagtcaaataaatgatgattaagaacaatattgaaaatttaggtgaaattttatttaatgcgccaatatatccttctttatcaagtgcacctacaatcacacctaataatggtaaaccaatcccagttagaacaaacgctaaaatggcgggccagaaaaattgaccactatccaatccgagattaggaggaaaaattagattgcctgcgccaaaaaacatagcgaagagcgtaaacccaatgacccatgtatttttattcatagagttactccttttttttaaaacacgaaataatttacaagtaaatattttagcacaaaaaataataaagagtctatatgaaatatgttgtacatagcagaaacaaaacacatgtgttgtttaaatcaaattatgccagaaaataaaattcttcaaattcactttttaaatagtaactgatgacttttattcacaatttcatataaactcatattttaaacttatttataaagatttaagtagtaatttttttaataatggagagagatgtccaggtaaatgcgcaacaccttcaacgaaaatagcatattgaccataaatattatgaattgtttgttcaacatcttcagttattggatcttgactcaaaaatacattaaatacttcaataccaaatttacgtgacatttctacagcttcatacgtatcaataataccatcttgactataattaaatgcagacggttcgccgtctgaaaatacgattaaaaatcgttgatgttgatttcgacgcattaatcgttcacttgcaactctaatagcaacaccatcacgattatcatcttgaggttcaagtgccataatacgtgggccatctttttcaaaggttgagtaatcatagttaataatttcattaatgatatttggttgtgcatgatcgtctgaatcaaaggcatcctcactgaatgataaaatttcatgtttaatgttcaatgcttttaacgtctcgtggaataacactacacctttcttcgtttcagccattttatcatgcatacttgctgacgcatcaattaacaatgtaaacgtcgcatcaaatgatttacttaaatcttgttttttgtaaaacaatttatattgatcgtcgataaaccaattaattaaatccttttgtaatcgcccttttgttaaattaaaacgtgcatctcgttgttctcgttcaatcgttttctttataatttgaattaagtctttgatttcatattgtacgtcttgtttcgattcttgatattctaaaacatattgtggctcaatttcaggaatttgccattttatttctacatttttgttcacaccatcaagttgaaatgcttggctttgaccaacagcatcgccttcttcacgatttagcgtatcgtttgatcctttgccctttttggtcatcatatcagtcatatcatctgtagcatcgccttcacgtgcttcatcattacctaatgtttcactattttgtccttcgtgaagctccatttctaaataggcgccaccttttgactcactatctgcagatttagagtcagctttttcactttcgttatcatcatcttctgaagtatcatcttgcccatcgacttgacttgcatcagttctctttaaatcatcaaactctggactagctaatgtattatatagtgttttaggtaagtaataatattcgtttagcatatcttcttttaaaatatcatctacttgatacataattctttgagccagatacatattatcttcagaattttgattttggaaaaaattaggtaaatataagaacatatttactaaaatatcatctaaatctgaatgtatagatggtatatcaaagaaatcttgacttaaaaatgcatgttctaaatacaaaaataataaatctgtatattgtgttttagtacgatacactttaatttgagattccgtatatgatacccgtgtatctaagcgaagatcaattaatttagcagtacttgggcgctcaactttaatagaatttaatacgcgcatatcttctaataatttaaaaagttgttgataaaatttagggtgtttaaaagttttatcttgtactacttcatttacaatttgtacatccatcatatgataaccgtaagcagctaacataacatctgtttttaaaccagccatttcgatatggcttggtcgatgtgaccaaaaccaactcgtaatcaaaacattttgaacaggattatagtaagggaatttttggattttaacttgtgtttgttcattttttaataagagtcgagctaagtcttgcaacatcattacttgcttggcatctaactgttcgtcgttaaattttatgaaacgatcactcatgttttatccctctttaaaagtttagttctacagcattatatattgcttgttgttcacgttcatcttccaatttatcaataattgtacgtttaattgcacgttcaactggcattacagtgattaaatcacacaagtctaataatgcacggatactagcggcttcttcagaaatttgtccctgcttagacatagtacgtaaatcttcgttaaacttaataatttgttcgatttgtttatcatcttgtaataaactttgctctttaatcacattttttaaaatgtccccgtcaatataatcaacgtgaataacaacaaagcgattttttagtgcttcattcattggcaaagtaccaacataaccttcatttatcgctgctataacgttaaatcctggtacagctttgattacttcaccagtgtatggattcgtaatttgacgacgataatctaatacaccatttaatacaggcaatgtttcaggtttagccatatttatttcatcaatatataaaatatgcccctctttcatagctttaataactggaccatctacaaagacaatttcttgttgaccttccgcatttgttttaattgttttaaagcctaataagctttctgtatctaaatcaacagaacaattgacttgatgcatgggtgtatcaacaacttcacttaatgtttctgccaactttgttttccctgaacctgttggacctttaagtaaaatatttttatttaaatcaaataatgccttcgcatcattgaaaactgttgaatctgaattcttataatgttttagtgccattttaaaacgttctcctttaaataaattaaaaaactaagacatggaataagttcttcaaatgccttagtttactattctattctgatataaaacgcaatacttagtatgcgaattgtttatattttaccaaatttactaattgaaaatctcatattaggcttcatttcaataattatgcgtttaaacttctttgaaatatgttttatagtaaccgccaactaatccagaattatctattatttgataatattcttcagtttcgttgataacatcatattgtttgccaaccgttaacatgtcagaaactgtaaatttctttgcatctgtattaatgacttctactttcttgattggtgtacgttctttccaagtttcatgtaacataaattttgtcctcactatcgtaaaaaaattatttttgtaaagtgaatataaacgataatccactgttttcagtaattctaattgattcaatatcatcttgctcaagcgtttgatatggtatttccacttcatctaagcgcgatttcgcttgattaaagaaatctgcatctttcgtttcaaactcaacttgatcgactgcgccacattccggcattgtcatttctgtttctacaggcattaaatgtatttcgccacctagaccacccgttccaactttgaatacttggacatgatagtcagcattgtcgaagggttggtattctgcaaatacttcaagtccgaatatatttgttaaaatttgacctgtaatatctacatgattcactttaagaatcactggtcctaaaccttgcacttgatgtaacggattgaccgcactctcaaaagaaggcatacctaaaccaacgccataattattctcgtttgaatatattgagaaaatatgaccattgttatcttcgagactgaaatatttattgccatttaattctttaactgttgtaaatggaatatccttattcgataatatttccgcatactcctctaaacctgagtcagttggtgtacgtaatccaatacccacaaagtgagattcttctaattgctcacttggaacttgtataaattgaagtcttgttcctgggcttatatctgcatcgccgaaacgaattgagttttcaagaagttcttcataatttaatcctaatatgtcaaccatgaaatgttttgtctgttctatatttgttgtacctaatgttatacttctaagtccacacattatagccacctctatctttatctttactattatattataacttattttaatcataaattatagaatatcggtcagttgattttgattatagattaatatgtgaaaaatgtatttctttaaaagaactatttcatttaaataggtaacataatattgttatggttgctattgagtatgtcattaatgagtatctgtatatagcaattgaatatttcgttttatgtagtacataaaaaacatatacatgtcgtatccataaagtgaatttacatcttgttcagatgattttaaattaactaaaggcgcttatagaattcataaatttcatcgcttgttattatctaaaatgatttcattagcatattgaaacacgccattccacctatatttctattgtgagtctatttcaataaaaatgatatattttttaagttgtcaaaattaaactcacattttaatacgaagcattataaaaataaagtacagcagtaagatatttcgactagaaaataatcttactgctgtttgttattgatttgattacgtttttaggaatagtaaactattttgtgttgtggattaagattctaataataagtcttctgggttttcaattaattctttaattgtttttaagaatccaactgcttctttaccgtcaataattctatgatcatagcttaatgcaatatacatcattggacgattttcgattgtatcttgatcaatcgcaattggtcttgtaataattgaatgcatgcctaagattgcagcttgattaccattgataattggcgtactcatcattgatccaaaaataccgccatttgtaatcgtaaatgaaccattaaccatatcatctaagccaagttttttctctcgtgctttaactgctaaattagcaatttctgcttcgatttctgcaaaattctttttatcacaatctcttacaaatggtactaataatccatcatctgtagaaacagctacaccaatatcataatattgtttcgtaatcatgtcgtcgccatcgatttctgcattaacttctggatactttttcaaagctgctacagaagctttagtaaagaatgacataaatcctaatttagtaccatcatgatctttcataaattgttctttcttacgtttacgcaattccataacatttgtcatgtcaacttcgttaaatgttgttaacatagctgtattattagatacctctaataattttttggcagctgttttctttctgcgtgacattttttcacgaatcactggttttgtaggatattgattgtattttttctcttcttttgcaggtgcttgttgtgttgtttgtgttgatgccggtgcctgttgtttcttatcaatatcttctttacgaaccacatcatttgttttcggacttacttcagcaagattcacaccattttcacgagcatatcgacgcgcagaaggcgtagcattaatacgttgctgattgtcatcatttgcttgattgacttcagctttatctaccgaattatttgttgtttcttcttttttattatttgtttcttcattttgttgtggagtattgtcgttactattttctttagaagcattgccactaccttcgccgatgatagcaattgcttgtccaacttctacagtgtcgccttcacttgcaagttgttcagataatacacctgcttcttcagatacaacttcgacattaactttatcagtttctaattcaagaatagcttcacctttttctacgctatcccctacgtttttcaaccattctgcaatggtaccttctgtaatagattctgctaattctggaactttaacctctggcatgacttatttccccctagttattttttaatgcattttctataattttattttgaacaagtttatgaatttctccatcgccttcagctggagcagccctttgaattctgccatgataacttaaatcatatttatctgcaactagcactttaacatatggatagacatataaccatgcaccttgatttttaggttcttcttgtacccatgacacttcttcaaggtttggcaattgtgctagtaatgcttcaatctcttcctctgggaatggatacaatctttcaatcgcaacgagtaacacggattcgtctggatttttagctaatgcttcttttaaatcaatgaacattttaccagttgctaaaataacttttgtaaccttatccgcttgatatgattctgtcaaaattggctcaaatccaccagaagtaaactcatcaattggtttggcaactgttttatttctcaataagctttttggtgacataacaaccaatggtcgcatttgttcagaatctaaactagctgcttgtgcacgcaataagtggaaataattacttgaactagataagttgacaactgtgcaattattttcagcagctaattgtaaaaatcgctctaatcttgctgatgaatgttcaggtccttgaccctcatatgcatgaggtaagaataatgttaatcctgaacgttctccccattttgagcgagaactgaataagaagttgtcaaaaatcatttgtgacatatttgcaaaatcaccatattgcgcttcccaaatattgaagctttttttgttttccacattatagccgtattcaaaaccaactactgctgcttctgaaagcggagaattgtgtatatcaaatgtcgctttttgatcaggaacatgatgtaaaggtgtatatgtttcacctgtttgctcatcatgtaacacggcatgcctatgactgaatgtaccacgttcactatcttgaccagttaagcgaatcggtgtaccatcttgtaaaattgtcgcaaatgcaagttgttctgcttgtgcccaatcaactaagccatcttctttattaaacggctcatgacgcttctcaagaactttgtttaactttttcaaaatgttaaagccatccggatatgttaacaatgcatcatttatttctttcaaatgatcaaacgtaaatgattgttcgtctgcttgtaacggtaatgcaagttctgcaggtttttccatatctggattatccattttatcagctttattaattttatcatgagcttgtcttagttccttttggacttgttctataaatgaatgcatttcatcttctgaaatgacaccttcattaacaagctttttaccaaacacatattcaacagagtcatgtttgcgaatattctgataaggaactggattagtaattgatggttcatccatttcgttatgtccgaaacgacgataacctactaaatcaataacgacgtctttatgaaactcttttctaaattccattgcaatatcaattgcttcaatagtagcttcaacgtcatcagcattgacatggaatattggcacatcataacctttggccacatctgtagaataagttgttgaacgtgcatcaattggttctgtagtaaatccaattctattgttagtaataatatgcaatgaaccacccgtagaatagcctttcaagtttcctaagttcattgtttcgaagttaattccttgaccaggataagcagcatcgccatgtataataattggcattgctttatgatgatcagtcgtcggagccccagctcgttgtgtatcatcttgtgctgctctcgtacgcccctcaacaacaggtgcaacaatttccaagtgacttggattgttagccagtgcaatacgctgcattgtaccgtatgaatcagtagttttaatgccaccaaggtgatatttcacatcaccagtccatccagcagttaactgcaagctaccatcttcaggtaagaatttcattggatctgtatgcataaattctgaaatcatcatttcgtacggtttttctaagacatgcgttaaaacgtttaaacgtccacggtgagccatgcctatttgtatatttttaataccttctttcgcagcaatcgtaatagtacgttgtaacatcggtacaagtgcgtctaccccttcaattgaaaaacgctttgcaccaacgaagtttttatgaagatatttttcaaacccttcaacatacgctaattgtttgaatagtgcccttttttcgttattatttaacgttactttatatggcgtttcaattcttctttttaaccaaccacgttcggtattgttattaatatgtgtatactcaaatgcaattggtcctttgtaacgtttttccattcttaaaattgcttcataagcattatcataaatgtcggcaaagtgatctgaaacaattcctgctgatataccttccaaagtctgttgatctaaatcaaagtcttcaatctctaatttaggtacatgtttcctttttggaggatttacaggataaatatcggctttaagatgcccgtattggcgaatattatcaattagacgcatgacacgcttaattgtgccgtcgctattttgactacttgtactttttaaagctggtacaattgagtcatcattcttaattgtgctgaataagacttgtaaatcttctggtacagatgatggatcttgtaaaaagtcatcatatagatctaacattagacctaaattcgcaccgaagtttacaggagcctctgaaacttcttttctttcgttagtcattttacaccctccacaaaaatgttgaaacgcttacaatgtaataatatcactatttagttatttgttaaagtagatttacctatttatctgctaaaaagaagaatcaacaaaagcgttgattcttctaggtttatagatgtattttattgtaaattttgggagtacaacagaaatgataaagaaccactgtttatttgttttatagttgttcttatacattagtcacagctaatgtgtacttaaaaaattgatcctatgactttgattgacgtctcagacatgattaaaatatgattttaaacgttgttcctttattaatttcacttttaattttaatcgatcctccgtttaattgaatgattttttgagcaatagataatccgagtccattaccgccttgacttcttgaacgagatttatccactcgataaaagcgatcaaaaatgaaatcttgatcttcctctggaataccaattccatgatctgtaatttcaattattttttgcttattttttaaccttgtcttaactttaattttcttattcttcacatcatatttgattgcattatcaataaagattaaaaataattgttcgaattgatgaggtttcattttaatttctagatttttagatgtcagatccgtatcaaattgataatcaggatgcaattgttttaatgagtgtattcgcgagcgaatttcatcattaatatgcacggtctgcgcttcagaagaaatgtcatttacatctcctttagtcaattcaagtaattcttcgactaattttatgatacgattcatttcttcaatagaaatatttaacgattcttctaatactgctgggtctttttttccccatcgctgaatcaaatttaaatgaccttgaataatttgtaatggtgttcgtaattcatgtgacgcatcttcaacaaattgtctttgttgattaaatgattcttcaatttggctcatcatctcattaaacgtatttgctaaattatctatttcttcataatttgtatttaattgcaatttattttgaaaaccatctcgtcgaatctcaatcattttatttgataaactgacaagcggtttagtaatttgtgttgaaaatacataactgattgtggcagttataattgttgcaatcactccaaatgccagcgcaatgatatacaatgattttacgatgttatcataattttctagtgaatgaattaacaagctataccctttgaaatcttgcgttgtaattggttctttaataattaaatattcaatgcctttatagcgtttttttattacgcggtcaaaataacggtgttcataacctggttcaactctcactgtgttatcattcgatgtctcaaataatttattattatgctcatcataaataattatctcttgaaaattacctaaagatgcattcaagtctaatgcagatatatctttaacaggcttagaatgaaataaattattaatatcgcttgagcttcgttctgcatcatcaagctcactattatgcagtgtatctttcaagaaaaaaataataattaaacaaaacaaaaatatcgtgacaaacgtaatcatcgtggtaacaataatccagttattgcgcaatttacgttttgtcatcgtatcacatacccaacgccacgaactgtttcaatcattttgtcacgatcgtatggttttaacttgtttcgtaaatatcttatataaacatctacgacatttgtttctacttcactattataaccccatacatgatttaaaatttgttcccgttgcataacatggtttttattttcagctagaagatatagtaaatcatactctgtttttgttaattcaatttctgcgccatttaccgtcactttaaaagcgttcttatcaattgtaataccgttgacatcgataatatccttttgtggctgacgacgtaaaattgcacgaattcttgctaaaagttcttcaatatcaaacggcttaactatataatcgtctgcaccgtaatcaagcccagcaactttgtcatacgtatcacttttcgctgtaattataatgataggtgtagattgttgttgtctaattttgcgacaaatttctaagccattaattgacggcaacattaaatctaatatgattaaatcatagtaatggctaagcgctttatctaaaccgtcttgtccatcatactctgtgtccacattgtaattttcatgtgtgagttccaattcaagaaatcttgctaagttttgttcatcttctactattaaaatttgcgtcatttgtacacctcatattacgactttttctaataaggtaatatattttaaattttgtatttttctatacaatagttgctttttaaattagtttgtttacgtttaaattttatcacaaatcaataaccatgttttaaatttttcaagctacaatcattaattatttattaactcaaatatttaataatcagttaatggcattctgttaattctgattgcagtacttaaatatagaatactgtaacacaaggccttaccgcaatattaattgttgtcatatactgacttttcactattgtaaaatgaatagttattatctttattttcacaaaatgaccgtagtttaaacattttcacacatcatttcaatgtgcgattttgaacttggaagtaacatttcataatgtataaattcaaaaggagtatgtaaacaatataatttttaaacctcataacttttaaatattctaattctaatgagaaatacaaatttttttattttctaaaatagcgtaatcatgcgttttatttactattcttaaaaaatattcaaaaaaagttttagtttctaattgacaatgattctcactaatgtataatagtagttgaaaatgattatcaataccacatagaacatcccccccacaacgtttcgttcttgttggattggtcattttcaaatattccccttttatatgcccgtaaaagacaatatacgttataacaacgttttataaaagcagtaaacccttacgacactttaggtttactgcttttgtttttttactatttaatttattaatttatttctaagtaataacgttgataaaataatgcaaaatacgccaccaataatgccggcaataatatctgttggataatgtacacctagatatacacgtgatatggaaatcaataaaatcatagctgcacataaccctataagaataccttttgaattaccttgatttaatcgatttaatagatagataccacttccaaaatatgcagttgatcccatagcatgaccgctaggaaaactaaatcctgttatatcaattaaacgcagcaatgtaggtctttctctatcgaatatattttttaatgctggattcaaaattccagatagtgccattgttaatgcaaaaaataatgcttcaattttgtggcgctttaacatgagatatgccacaagaagtaatgaaatacataacattgcccagacttcacctactttagtagccccaagcatgatagatgtcgtaataaagctctctgatgaatatataaattcataaacttcattatcaatccatttccctagtcttgattcgtggaaaaacgcgataattccaaaaaccaatgcaaaaacgatgagcaaagagatacgtttccattgactcataaagcattaccccccattaattcaatgcgtctttaatcatcttatcaaataaagcttctttcgtataactttgttcatacgatttcatattattgataattcgagttctttcctgttccatttcatttagttcttgtaataaaatttgtgctgttaattgttcttcatcaatcgttttagcataacctttatcagcaaaatgatttgcattgtcaatttggtcgcctcgggattgatctaaacctaatggtactaataacattggtatacgtaatgttaagaactcataaatcgcatttgatccagctctacttattactgtatccgtaattgctaataaatctgttaaatcctctttaacaaattcatattgtatatatcctgattttttaacttgagcatcttttaatcctttaccagttaaatgtatcacttgatattgttgtaataatgcatctaagttttcgcgaataatgctatttaattttttacttcctaagcttccacccataacaagtaaaacttttttattttcattaaagcctgttaattgataaccattatgtgcattaccattttttaaatcttctcgaattgttgctccaataaaatcagctttctctttaggtaagtagtttagcgtttcttcaaatgttgtatatattttcttggcaaatttaagtgctatcttattcgctaatcctggtgttaagtcagattcatgaataatagttggtatatttaatgatttggctgcaataacaacaggcacagatacaaatccaccttttgaaaataatagatcaggtttttcttttttcaaaactttacgagcatcaagaatacctttcaatactttaaatacgtctttggcattttctaaagaaatatatcttcttaatttaccactcgaaataggataatacttaatttctggtagttgtgattcaatcatttctctttcaataccatttttagaaccaatataaagcgcttcataaccttgtgataatgcagttggaattaaacttaaatttactgatacgtgtccaactgttccccctccggtaaatgcgattttcgtcattaatattacctctattcttttaaatttttataatatgcataaaatggttcacctttatcatatggcggatattccattaattgttcaccgaccttatgaaatccaaatttcgcaaataaaccttgtgcaggtttgtttaacgcaaaggtgtccgttaaaataacttctgcaccacgtgctttaactacatcaataacataattgaataattctgtagcagctcctttatattctttcgaaccagttaatcgatgaataacaaaggcgccttctctatttactggccagtcaatgtcatcataccattctgcttggtcttggtcgacaacaataaagccataaattttgtcattttcctctaatacgtacaaataatctttagcaatatcttcttcaaaatgttctaaaagtgggtactgatcgtcccattgctcgttgtcgtgttctttcattaattcttttgcttcttctactagatttaagatttgatctaaatctgacattttacctagacggatcatgtacgtcactccttatatcgttatgttaaacatgtttttcagtacatgttaatcttacacactattaacatgctttaaacctttattatgaatgaaaaatagtaattatcacactatgggatgaaaataaccaataaaagtatcatataccaattaatcgattgttaaaactagtgaataatactatttaaaaagtatatgctcatagtatattaaagcatgaattgttaacagcgatgatagaaattgcgttatttacatcatttgtaaatgtctaatttatatcttttagggttagacgtcaataaaaataaacacgcctcctaaattgctatctttgcaaatttaggaagcgtgtcattaacataataataatacaattttagtagtgtgtatcgcttattttaaaatattaatcaacttatcgagaacatcatcatgtttattagctttttcaactaataactcagtaaatttattattcgtttctttattaaattcaccagttacctcgagtttattcgcttgttggaaagctttaacttgattttctaaagcttgatcaaattgcgttgattcattatcaactttataacctaaagctgataaaccaattttaatagttttaatatttttatcatcgtctccaactttaaatgttttcgtattaggaatgacatttaaagattgatatttaggtgtgtcaatagtaacgtctggtttaatgcccttaccgtgaatataatgaccatctggcgttaaccatttcatttcagtatattttaacaatgaaccatccttaaactctcttgtagtttgtacgacacctttgccgaatgtttttgacccataaactttagctttattatagtcctttagcgcaccagtaaacacttcagaagcactagctgaaccttcattcactaagatggatatatccatgtctttcgcttcttttaacgagtcattagaagtttgaattgcttcagtatctttacctttttctagtttaacaacagtttttcctttatcgataaaaatatttgccattttaacagcttcatctagtagtccaccaggattatttcttaaatctaaaacaatctttttcaaaccatctttgtgagctttaagaactgcatctttcaattcacctgatgtatcattctggaatttattaatagtaataactccaaccttaccttttttcttatactcaacacttttaacatgaattttttcacgtttaatcttaacgtctttttcttcactgcctcgttgaacagttaaagttacttcagtgttttctttaccacgaacgtctttgacaacttcgtctaatgcttttcctttaattgattttccatttactttagtaatgacatctttaggacggatgccagcacgttctgctggagaacccttcatagggctagtaaccataatttgatcatttttcttttgcatttctgcaccaatacctacaaaatcacctgaaacaccttcattaaaggatttcgtttgttcttttgttaaatattcagaataaggatcttttaattctttgaccataccatcaattgcagctttacttaacttgtcagagtcctgttttttgtaataatcactatttaagattttatacacattttcaattttatttaagtttgcttgatcagttttgtttaaaccacttattttttgatttataaaaatatatgcaacaactgtgatgacagctgttattagggttgtgccaattaatattgatatgaattgccaacgttttaagtgaacgcgtttcgatgaattagtttcttggtcttgattgcttgttgcaatttcagcgcgttcatcatcggatgaagatgtgtgttgcttatcatccattgtatcacttccttattatgtattatgtacttttaaattctgtgtagttaatcatatcaatttatgcaagatagcgcaccatatttcactataattgattaatttttagtcacaacttagtttattttaaattaaaaccaggataacgaattgcatcaccctggttctaactattatttttaaaaattatattaaaattttagccattccgtatattcttcatataaatcatcaaatacagacattggcaatgtgaaatcaccatgtgtctcaatataatcagacagtatgttaaaatcatcatcgtgttttgggaaagcaagatcgtcaaatatctcttctgctagacgacctttatcgtcgtgtcgaccacgaactgtcatgacaaattgataaaacgaatagtttttcattagttcattgtcacatcaatcacttttgtttcacctttaatcacagcattttcatcataaatattaattgaagctgcttgatcagtgttagtaattataattggtgaaataacagatttagcgttattattaataaattcaaggttgaatcttactaatggatctccgacgttaacttcgtcaccactagacactaacacttcaaatccttcaccgtctaattgaactgtgtctaaaccgatatgaactaataattctaatccgttatctgcttttaacccaatcgcatgcttagttggaaagacattgtcaacacgtcctgcaattggagacacaacttctccttcagttggattaataccaaaaccttcgcccatcattttttgtgcgaatacaggatctggaatatcttcaattttcacgtattctccagttaatggtgcataaattgcgatatctttctgaacttctttgccttttccgaataattttttaaacatactttccactcctacttatcaaaatgtgatattaaatcgccataacccaattcttctaatttttcatatggaataaattgaattgcagcggaattgatacagtatcttaagccgccactttctttaggtccatcattaaagacgtgtcctaaatgactatttgattcttctgaacgcacttcagttcttaccataccaaatgatttgtcgactaattctataatttcatcgtcatcaagcgctttagaaaagctaggccatccacattcagaatgaaacttttcttcagatgtaaataaaggtttaccagaaatcttatctacataaatccctttagcaaaatgattccaatattcattcataaatggtggttcagtgccattttcttgtgtaacaatatattctatgtctgttagttcacttttatcttttttaagcattttgattcccccaatgtgattctataaacgcttttctacctgaaccacgttgatattggtaataatgtaccgggttctttttataataatcttgatggtagtcttcagctggatagaaatttttatatggtttaataggtgtaatcactggtttcttgaaaataccttgttcatttaattgttgctttttaaactcagcagcctttttctgatgctcatcatgatagaaaatgactggttgatagctttcgcctctatcgaaaaattgcccttgatcatcagttgggtcaaatgttttgaaatatatgtctaatatattttcaaaggaagtaacctctggatcaaacgtaatttgtactgcttcgacatggccggttttattcgtacatacctgtttataagtagggttatcaacatgaccgccactataaccagatacgactgacttgatgcctggatatgatgtaaatggtttaaccatgcaccagaaacatcctcctgctaatgttgcatattcttttgtcatatgaattacctcctctatctatctaattataaatttagtctataaaggattgaaatggaagtaattaacactgaaaagattaaatttacttcttaaggactacgaggccaatcgcaccttgaccagtatgtgcagaaataactggtgtagttacatttatatcgtaattattcacatgaaaagcttcgttaaaaactttcttcaatttatcaacatattcaatgacgttagcatgtgcgacaccaatggatttgatttcatgatctcctataaattcagcaatttcctttttcaagtattggatactagaattttgagttctcgcattgtgcacaagctctaagcgaccatcatcaagtgtaccaattggtttaattttcataagattaccaatcaaaccttttgttttactaattctgccacctttaattaattgattcaattgccctataactacaaataatttaatgttttctcttaaatgatttaactttttaactatttcagaagttgagacaccttcttttacaagctctactaggtgttgtatttgataccctaaaccaaaagaaatagattttgaatcaataacagttacattagcatctaccatttgacttgcttggtaagcagtgttatatgtaccacttaatcctgaagaaagatgaatacttatgatttcagagccatcttttcctagttcttcataagcagatataaattcacctatggctggctgacttgtctttacatcttcatcattttcaatatgattaataaattcttctgatgtaatatctacttggtcaacgtatgaagctccttcaatagttaaacttaaaggaattacatgaatgttgtttgcttctaagtattctttagataaatcggatgttgagtctgttactataatctgttttgtcatggtcgttttcccccttattttttacgaattaaatgtagaaaggtatgtggaattgtatttttctcatctagtttaccttcaactgaagaggcaacttcccagtcttcaaatgtataaggtggaaagaacgtatcaccacggaatttaccttcaataacagtaatatacatgtcgtccactttatcaatcatttcttcaaataatgtttgccctccaaatatgaaaacatggcccggtagttggtaaatatcttcaatagagtgaattacatcaacgccctctacgttgaaacttgtatctgaagtaagtacaacatttcgacgattcggtagtggtttaccaatcgattcaaatgtcttacgacccattactaaagtatgacctgttgataattttttaacatgtttcaaatcatttggtaggtgccaaggtaattgattttcaaaaccaattactcgttgcaagtcatgtgcaactagaatggataaagtcataattatcctccttcttctatcatttcattttttattactaagttatctttaatttaacacaatttttatcataaagtgtgatagaaataatgattttgcataatttatgaaaacgtttaacacaaaaaagtacttttttgcacttgaaaatactatgatgtcattttgatgtctatatggttagctaactatgcaatgactacactgctattggagcttttattgctggatgtgattcatagtcaacaatttccaaatcttcataatttatgtcgaaaatagacttgtcactgttaatttttaatgttggaggattgaagctttcacgtgctaattgtgtttgaatcgcatcaatatgatttgaataaatatgtgcatctccaaatgtatgcacaaattctcctacttcaagtccacattctttggcaataaggtgtgtcaataaagcgtagcttgcgatattaaatggcacacctaaaaagatatctgcgctacgttggtataactggcaacttaacttaccatcttggacataaaactggaacatggtatgacaaggcggaagtgccattgtatcaatttctgttggattccatgcagatacgatgtgtcgtcttgaatctggattatgcttaatttgttcaattactgttttaagttgatcaaaatgattaccatctttatcaacccaatctcgccattgtttaccataaacatttcctaaatcaccgaattgcttcgcaaaagtatcatcttcaagaatacgttgcttaaattgtttcatttgttctttatattgttcgttaaattcaggatcactcaatgcacgatgcccgaaatctgtcatatctggaccgttatactcgtctgattttatataattttcaaaagcccattcgttccaaatattattattatattttaataagtattggatgtttgtatctcctttaatgaaccataataattcggttgctactaatttaaaagaaactttctttgtcgttaatagtggaaatcctttagataagtcaaagcgaagttgatgaccaaatttcgaaatcgtacctgtatttgtgcgatcatttcgtgtatttcctatttctaaaacctcttcacaaagactgtgatatgctgcatcaaatgaattcaacatatgcgataacacctcattttcattatttatagtatgtatatttagtttgatataacttaattttatgtagcattttgttatcactcattttaggaatatgatattaatatcatgaattccgttactttatttataaaatgctgattaagtacctaccacatcgtaacgtgatatatgtttccaattggtaattgtttacccaaatctataactttaatgctaaaaaattttaaaaaagaggttaacacatgatttgaatattatgtttgatgtcctattaaaacagttaaatttctagaaaatatagttggtaaaaacggactttatttaacaaatagaatacaactatattctctattttcaatgacagacaccatttttaatattataaaatgtgttaacctttatatttatttatgtgtactatttacaattttcgtcaaaggcatcctttaagtccattgcaatgtcattaatatctctaccttcgataaattctctaggcataaaataaactaaatcttgacctttgaataaagcatacgaaggactagatggtgcttgctgaatgaattctcgcattgtagcagttgcttctttatcttgcccagcaaaaactgtaactgtatttgtaggtctatgttcattttgtgttgcaactgctactgcagctggtcttgctaatccagctgcacagccgcatgtagagttaataactacaaaagtagtgtcatcagcatttacttggttcatatactccgatactgcttcgctcgtttctaaacttgtaaaaccattttgagttaattcgccacgcatttgttgcgcaatttctttcatataagcatcatatgcattcatatttaattcctccaattaaattgttctgtttgccatttgtttccatactgaaccaagtgcctcatctccgttttcaatacgagatatggccatttcaatttgtaatttaacttcaaacgcattgtcattaatatgggcttttagtgcgggaagctgctctgcattaccttcatcaaagataaacatagcagcacgccacctaacgattttctgtggatcatctaatagtagcaccatttctggtagtgcctctggataccctaaatcgcttatgcaatcccctgctgttcttcttacagcaggacttttatcacgaagccccttatataaatacggtaaaatttctttactttcaatcatacctaataatacaatcgcttgacgtctaaccggtactttttcatcagataaagctaaatcaagtagcggtatatcttcaaaagtcggctttggaaaatggtttaacattcgtaatcgagtcttccaattatcagttgcatgatattcatccaaagagacatgtcgatagaaatgataattattagttgcgtgattttcttctaaagcatgttttaccaatacgggtaactgtgattctggataggtagctagcacttcttctaggacaccatccattacttcttcaatatttccatagcgatttcctaaatctagccatttacgcataaaaacaatattgtcatgtgctgtttgcgcttgagtcatatgatcaacatatgtttgtggtaattgttctcttaattcttggtcagcagaagttagcttaatttgatacggtatacccttaaaagttaataattcagctttaatttcaccaaaatgattgtcaatttgaggttcatttacagattctaaaaccttattcgcatcagaaaaagcagctttaatatcaggtaatatgacttcccaatcagcttttggtgccttatcaacagctaagaagttcatgacatgaaaaatggaagtgataccatctatagataacaactgatttataaatcttggttgtgtttcttctacttttttataagtattagataacttgtcttctcttgtatatgacaaaacaactttcattgtatttggacttggtgttggctctatacgtaaaatttccatatactttattccccccgaatactagttgatgaaaaatttattcgaatacagcctctacttttggcaatactgtttcccaatttgcgtcattttctttatctactgaaataaagtccataacatggaaaattgatttaacgccttcaacctttaagatgtcattaataaatgctggctgtgaatcatcaactttagtatacgtatctgatgtcataccttctctgctttcactaagtgtaatcttcattgtgttgtggttcggtgtttctgatatagatataattttcatttgacttcctcctattgaagttcatttcctaattgttttatttctttccctattgaacactcattgatacaaaaatgatgcgccttcgttttcccctctaatttacgcagacgagttttgattggacattgattgcaataagtattcattaaatcatctattttcgcgagtgcattttgctctgaaaaagttaaaatacgcgacacttcctttattacttcaaaatattgcaaccttgtaaataagtgttactgttttaaatttgacataaaaatattataacatttttgaccctaagatttgaatgaaaccttttacaattctatacgtaaaatgtatttatattcaaatgctattgcatcgcaaacgatttttcagtaaaatgagtaagttatttattgagcggtttctaaacacccgcatgatcaaaatttaggaggacattttaatatgtataatgaaattttaggactagttacgtttattgcaacgttcgtacttatggtacttatgtatcgcttttttggtaaacaaggtttaattgcatgggttgcaattggcacaatcattgccaacatacaagtgattaaaactgtagaaatctttggtatttcagcaactttaggtaatgtcatgtttgcttctatttatttagcaacagatattttaaatgatatttatgggcgtagagttgcaaaaagagcagtttggttaggcttttcatcaacattaattatgattattgttatgcaattgtcattacattttattcctgcaccagaagatatggcacaaaaagcattacacgcaatctttgatgttgtgccacgtattgctttaggctcaattgtcgcatatattattggtcaacatattgatgtatttatcttttcactaattaaaaaagtatttagttctgataaaacgtttttcatccgtgcatatggtagtacatttttaagctcaataattgatacagctttatttgtagctatcgcttttatcggaagtttacctggtacagttgtatttgaaatatttattacaacttacgtattaaaattagcttcaacagttttcaatgtaccatttggatatattgctaaatcattttatcgtaaaggtaagattgataagttagatcaaggctattaacgcacttactacacaaaagaataagttttaagggagtgggacagaaatgatattttcgcaaaatttatttcgtcgtcccaccccaacttgcattgtctgtagaaattgggaatacaatttctctttgttggggtccatccccaacttgcacattattgtaagctgacttttcgtcagcttctgtgttggggcccacaccccaactcgcattgcctgtagaatttcttttcgaaattctctgtgttggggcccctccccaacttgcacattattgtaagctgacttttcgtcagcttctgtgttggggcccctgactagaattgaaaaaagcttgttacaagcgcattttcgttcagtcaactactgccaatataacttcgtagagcatagaacattgatttatgtcccagcctgaagatgatttttttaggaagtatattacagtactacgtattagaaaatcatctttgaatcagcgagtattttaaacacgtgttacttatttaagtgatgcgtgttttttaatggattacccaacatattttgtattacagtaatagtaactttaactaagtattgaatagaaagtaggtttattatggcgaaaataaattttgatgctgcgacgaaaggaaatccaggcataagtacatgtgccattgtaatcaaagaagataagcagcattatacatatacacatgagttaggcgaaatggataaccacactgcagaatgggctgcatgtatttatgcactagaacatgcacgtgaattaaatgttcaaaacgcactattatatacagactcaaagctaattgcagatagcattgaagctggttatgtgaaaaacgcaaatttcaaaccttattttgatcaaatagaaatatttgaaaaagattttgatttattatttgttaaatggataccgagagaacaaaacaaagaagcgaatcaacacgctcaacaggcattgtataaattaattaaaaagaataaataaaaggagcaccgactgatgtgatgtcaatcggtgctcctctatttatcaaagaaacaaattattttttatttttcttagatttctttttcttctttttagctgctacctttttagaagtattttttgatgctgactttttgtctttggattggttatctttttgatttttctttttagccaataataaaggaacgtcctcatctttagattcaatactagttgttgtttcaacatcttcctctttatctttgcgtcgttttgcgaataagagtggtgaatgttcgttatctttcaacactttttcatctgtgttttcatttgtaacttccacatcttcttcatcttctttacgacgacgttttggtaagaagaacggcgtatgtttaactttatcgagtgactcgccattatttagcgaatctttttcttcaacagtaacatcttcttcatcttcttttctgcgacgtttcgcaaataaaagtggtaaatgttttgtatcgtctaaagtctcttttattgaatctttattattatctcttatttctaattcttcctcttcatcttctttacgacgacgtttggcaatgaagaaccagaaactagctagtaagccagagatacccaccacaccaatagcgtttttaataacattaccgaaattattactaaagtgacgcatatgaagtggatcaatgtcatcatcttcatcaagtttctttttatgtccaatagtcgaactgttaaatggatgatttgcagttccataaccaattgttaaatggctattagattcatttccagtacttgacgattgtttagcacgatcagatattacaatttgtactgctgaaattcgagcaataccattgttcaatgcagcctcaacttgctgtaatgtatgcgcattattaatatctctaattgtttcaagcacaatttcgttaatttgattcattgctgcttgtttttcatcagctgtgccaatttcactatttcgaatactatttattttttcatttgaaaagtctttaattctactaatagcttcttgcttgcgtttagctagttcttttgctgttggattagctgctttcatttgagctttaaattgttccaattgctcagttatttcactgatgctttgcgcacgttgaatcgcttgaattgcttgttcttttaattgatttaacttagcaatagcttcttgcttctctttatctgttagatcagtacgagctttgatttcatcaatcatatgttgaattgcatcttcaatcgatttaattgcatttgattttgcttgttcaatcgtaaattgttctggattaaattgttcaatatacgcttgttcttgttgttgaatttcttcaactgaatgaacatcaggtgcattgttaacatgatcaattgcttgttgtttaagcttattaacttctgcaattgcagcttctttttgttccagtgttaatgtcacactattattgatttcatcaatcttttgttgtgccgcattttcgattgattcaattgcctgttgtttgactactgacaattctttttctacaacttttacaggaacattaacaatcacttttgatccatcaagcaatgtaacttcaacttttgctgttaagctatcagaaatcgttgcagttgatggtgtatcaataacttctgctgaaagctgatcaattaagtttatgtgtgcaagaatatcttgttctgtaatgatgtcatcacgatgtacaatgagttcaccattaactaagatttgctcaggtgttgcttcaaaaatttcatttacagcaggttgttcatcaacctcccatacatgtgtatttctaatgtcatctaaacctaagtttaatcctcgatttaattgatctatagtttgagcattctcaacgttttgtagtgctcgtttttcagcttcgtcaatttctttgagcgcttttgctttttgctcaggtgttaaatctggatttgaattgatttgatcacgcttcgcattagctaaggcttttattgcatttttcgcatcttctttagctttcactaaatctttgatgtcttgtaatgcttgtgcaagttgtgctttggcttgttcaatttcttctttagtcatcgcattgttaatgtcgttatgaccttgttgcagtatttgattgattcgatctttaagcgcttgtttttccttatctgttagatttggattttgatcgatttcgtcaattaatgcttgaacttgtttatcaacatcttgtttcgcattttctttagctttcactaaatctttaatttcttttaatgcttgcgcaagttgtgctttagcttgttcaatttcttctttagtcagtgcattgttaatgtcgttatgaccttgttgaagtatttgattaatacgatctttaagtgcttgtttttccttatctgttagatttggatttcgatcaatttcgtcaattaatgcttgaacttgcttatcaacgtctttattggcatcaatttttgcttttggtatttcattagcatgcacttgttcaatcgcgtggttgcctgctgtttgaacttgagatacagcctgattacttgttgctttattaatgttgttgatgatgctgtttgccaattcttctgctttatttttcgcaataagcttgtcttgatccgtcgcatttgaagcttcgatttcttttagcttattagctaaagcttgattaattgattgaattgccttgtctttagcatcttgtagtcgttgatcaccattaagattatggattgcatcattgactgcttggattgcgccattgatatcattcacatttgtgttatcactatttagcaatgtatttgctagacgtttggcatcatcgaagtttgttttagcattatcgtcagcgttttggtaattgacagtttgctctgcatttggaatttcattgtcaactaaatgtttccattgcatcatttaagtcaatttgattattaacaatatctgttacatctgatacagtatcggcattgttaattgctttatgtgcaagatcttgttgctgttgatttaatccatttaacgaattaacaaacgcatttgctttatctttggcatttgcaaggttttggtctccatttaatgcattttgagcatcgataatattttgtttcaattgctctgcttcagcttttgcaattgcattaccttgcactttatctaactcatgtgctgcattcgcaattgcattatcataatttgctttcaaattgtcatctgcattgatgtaatttgtgctgctgataacaccaaggtgctgttcgtcaatatattgttgtactgcacccattgcattatctaatttagttgctctattaattgctcgagatgctttatttagcgtttcagcattattaatttgttggattgctaattgtctttgagcattgtttagatgtgttaattgatccaatctttgtaatgcttcagctttacgattattaagtctttcttcaccatttaatgctttcttagctgcagtgactgcatcatttaatttgataacttgttctgcagttaagttttgcccagacgatttatcaagtgcttgtttcgctttatcaaccgcttcatcatatacttgtttgacttgtgtatctgcattgacatagttcgtgctacctttcgtgcgtccttcattgccagtgatttcttgtgacaattgatccattgcacgattaagtgccttagcctcatctacaatttgttggatttgatttaaatcgtttgattgatcgatgcgacctttaaatccatcttgttgagcattgtttaatgcattcaattggtcgatgtcatgtttaccatttgttttagcaagtgctacacgttcatcaccatttaatgcttgttttgcatttaaaatattttgaagtgcttgatccacttgttgcttattcgcattttgtttcaatacattttcagcatcagcaatcgcttgtttataagccttttgcttatctgaatctgcttgtgtgtaatctatagtttgctcaacgttagcatgttcattaactgcttgttgtaattgatccattgattggttcaattgcgttgcttgatctactaattcagcgattggttgaagtttcgtcgcttgatcaatattttgtttagcagttgcaatttgatcagcatttaaatgtgttaattggtcaatagtttgtttcgcttgtgttttagcttcagcgactctctcattaccatttaactcattcactttttcttgaagcttagttaatgcttgttctacagcgtctttattcgcatttgaaccattagttggatctgtaatgctttgtgcagcttgtaacgcttgatctactgcttcttttttatcagttgacgcttcagtgtaatttggttgagccttatctgtattcacttgatcaactttatttttcaatgtttccatcgcgtgatcaagttcagtagcagtttgaacatgttgtgcaacctctgttcttgtaggcgctgcatttatagcatcagttaatgtttgttgttgtgcatgatttaagtttggcaatgcatttacagttgttactgcttgttgttgatcacgagcaagtttttgatcaccatgtagattatcttttgcagttgttactgcttgtgttaattgttctacttgtgatttgtcgagtgttggattacctgtttggttaattaaatcttttgcattttgaactgctgcttggtaagcatctttttgcggtttatcttcattgataaacttgctacccgcttccgtttgttgttgatcttgaatactatttcgtaatgcttgcattgcttgatcaagcgcttttgcttcagctaatttttgcgctacttcgccacgagttgctgcgttgtttatttggctttcaagtgcttgacgttgcggattattcaaaccatttaattgatttaaatcagtaaccgcatgttgtttatcgtctgcaagtttttgatcaccgtgtaggttatctttagcttgtttaaaagcatgtgtcaattgttcaacttgtgctttatcaagcgttggattacctgtttggttaattaaatcttttgcattttgaactgctgcttggtaagcatctttttgcggtttatcttcattaataaacttgctaccagattctgtttgttgttgatcttgaatgctattacgtaaagcttccattgcttggttaagtgcttgtgcttcagttaatttttgtgctacttcaccacgagttgctgcattattgatttgattttcaagtgcttgacgttgtggtgtattcaagttagacaagttatttaacgtttctgttgcacgttgcttatcttgagctagtttttgatcaccatgtaaattgtttttagcatcagtcactgcctgtgtcgcttgatcaatgattgatttagctaatgtaggatcagttgttttgttaatcaaatctttcgcgtgttgtactgcttgcgtatatgcatctttttgcgcttgatcctcgttaataaatttactacttgcttcagtttgtggttgatccttaatactttcttttaatgctttcatcgcttcatttaatgcttgcgcttgtgcaatgatttcagccactttatcacgagttgttgcattattaatttgattttctagcgcttgttgttgagctggtgttaattgatctaaatgatttagagaatttccagcagtttgcttatcttgagctaatcgttcaacaccatctaatgcatttttagatgatattactgcttgagtcgcacttgatacattacctttattgatagttggattatttaatcctgcaatgatagactcagcattttgaactgcttcatcataggcttgttttttattcggttctgcattgacatatgcactgctcgcacgtgttgcatctttgtcagcaatactttgttgtaatgcatccataagttgatctaatgcttgtacttcagtcaaatcttgcttaactgctgttctagttgtttcactatcaattaacgtatcttccatatgtttttgtgcattgtttagatgtgctaattggctaaccgtttgtttagcatgatctttatcattttgtaatttcacatcaccatgtaatgctgctttcgttgtattcacagttgccgctacttgattaatcgcattattatctaatgttgcagtttgttcattgataatattatttgcggcttgaacagcttgatcatagttttgttgctctggttgatcttcgttgatatatttgctatttgctttagttgctgcgttatcttgaatgctctgtcttaaaccatgcattgcttggttaagcgtattcgcattttgttcaatttgatgaactgcagttactaaagttgcagctgtaacttggtcttttaatgctgttttttgaggatcatttaagcttgttaaagcatcaattgcttgcgtcgcatttgttttagcaacttgtaaattatgatctccatttaacgcttgaagtgttgtttgaactttagtaatagcttgttctacttctgtttggttcgcattttgaccagtttgtttgttaatcattgctgctgcttcatttaccgctgtattataagcagtttgtttatcagtatcagcattgatgaagttaccacgttgttcaacggcttgatgatctgcaatcgcattaattaagttacccatcgcagtatttaaagattctgctgtttgtttgtgaccattaactgcagcaatatcagatgattgcgtaatttgtgattgtaactgttgcttttgcgcattattcaaatgatctaattgatcaagtctgttgtttgcttgttgtttagctgctgcaaggttttcatcaccatctaatgcaactttcgtattattcacttgtgtcgttgcaccattaacatcatctggattcatcgtaggcgatgtagtttgattaatgatattattagcagctgttacagctttgttatagtcattttgtctttgcgcagttgcatcatgataatcttcagacgctaatgtcgtttgattatccgcaacactatttcttaataattccatcgcatgatctaacgtttgtgctttttgattaatcgtagtgacatctgtaacaagtggcgcttgtgtaatttgactttcaaatgattgtttttgtgcatcatttaagtgtgttaagttcgccaattgttgttttgcttgttgttttgcatttgccaaattgtcattaccatttaatgcttgtttcgctgcgttcacttcattagtgatgctttcaacttgtgcttgtacttcattagtaccactttgtttattcaataatgcttcagcttttgctactgcctgtttatacgcattttgtttgtcaggatctgcatttaagtaattaccgtccgctaatatttgatctttatcattaatagcttgtgataattgatccattgcttgatctaggctcgttgctgtttgtttaacttggttcactgtagcaatttcaggcgattgatcgatttgaccttttaatgcttgtttttgagcatcgtttaaatgcgtcattccacttacggcatctttagcattttgcttttcagtggctaatttagcttcaccgtttaagctatttttagcatcagtcacttgagttaatgcacgagtaatgtcatctgggttaagcgttggatttgtcgtttgattgataataccttccgcttgagacactgcatttgtatatgctgtttgcttatcgacatcagcatcgtggtagttctcacttgctttcacagtatctttatttgcaataccttgtttcaagttacccattgctgtattcacattttgtgcattttgtttagtttgttcaactgtagctaaagcttgtgcttgattgatttggtttcgtaatgcatcacgttgtggttgatttaagtcacgtaacgtatcaagatttgctaaagcatcttgtttcgcttgcgctaatttttcatcaccgtttaatgcatctttcgcttgattcatagttgtaactgcttttgttactgtatcaggcgccaatacaggtgttggtgtgccatttgcgatttgttgcgcttggttagctgcattgttataagcttgttgtttgtcttgatccgcttgtgtaaagtcaactgattgtggtacttgactattcgcttgaatttgttgtttcaacgtacccattgcattatttaacgcatcagcattttgcttaatagcattaacacctgtaacaagttctgcatgcgacacttggtcttttaatgctgttttttgtggttgatttaagtttggtaactgatcaatggctgtatttgcattgtctttagcaacttgtaagttatggttaccgtttaaatcacccttagcttgattcacttgttgtaacgcttgagccacttgttgtggatccacgtttgcatttggtgtaccactaatgatttgttcagcatgcgctaccgcattgttatatgcattttgcttatcagtatcagcattgacaaagttaccatttgctttagtttggtctttatctgcaataccttgtttcaattgtgtcattgcttgatttaaatcttgtgctgtttgcttaatcgtgtttacatttgcaacagtttgcgcagcatcgacttgttgttttaatgcatctttttgcgcttgatttaaatcatttgcatttgtaattacttgtttcgctgcatcttttgcacgttgtacattgtcattaccattcaatgcttgtttcgcttcgttcacacgttgcatcgcttgttccacttcagtttgacttgcattgctgccatttgctttagataaaataccttctgcatgtgaaaccgcattagtataatcatctttcttagcttgatctgcatcagtaaagttaatgctatttaatgtctcagttttatcttgtaatgcattgtttaagttagtcatagcattattcagattttgagcattttgcttaacattattaactgttgcaatatctggtgcttgttcaacttgagttgttagcgcttgtttttgagcatcatttaaatgatctagtgtaccaagtgttgtcttagcatcttgtttggcatcagctaatttttgattaccgttaagtgcttgatttgtgtcattcactttagttaatgcttgttgaattgtatttggatccattgttggatttgttgtttgttttaacaattcttctgcttttgttactgcattatcatatgctgtttgcttgtcagtatcagcatcgtgatagttctcgctacctttaatttgtgctttattcgcaataccttgtttcaattgtgtcatcgcgtcattaagcgttgttgccgcttgttgaatagcattgacgtttggtacaagtgttgcttgcgtgatttgtttgctgtattcatcacgttgcgcttggtttaagtttggcaattgatcaatagcatgttgaacattttgtttcgccgttgctaagtttgtattaccatttaaatcatttttagcttgcgtaactttatttaacgctgcagtaatttcgctaggtgtaacgacaacatcaggcgtaccactaattaatgcttcagctttcgctactgcttgattatatgcattttgcttgtcagaatctgcattgacaaagttaccatcagcttttgtttgttctttatctgcaatgccttgttttaattgtgtcatcgcattgtttaactcttgcgccgtttgtttaacattgtttacaccagctacagtagttgcattttgtacttgttgttttaatgcatctttctgtgcttggttaagatcattagagttattaattaatgctgttgcttcgtcttttgcatgttgaacgttggcattaccatttaatgcttgttttgctgcatttacttgttggattgcttgttcaacttcagtttgtgttgcattaccaccattagcttttgaaatgatattttcagcatttgtaactgcagtgttatatgcttgttgttttgcttgatctgcatcagtgaagttaactgttgctttcgtagcatctttatcagctatcgcttgtttcaagttacccatcgcagtatttaagttttgcgcattttgcttaatttgatttgcttcatcaacagtatgcgcgccattaatttgattagtaacagcttgtttttgcgcattatttaagttgtctaatgaacctaaagattgcgttgcttgttgcttcgctgcctctaagttttcattaccatttaaagcatttttagacgtgcttacttgtccagcagcttgattgataacagtcggatctaatgaagggtttgtagtttgatcaataataccttgtgcagttgtgacagcattattgtacgcatcctttttattcggacttgcatcagtataattttggttttgttttgttgtcgcattatctgcaatactttgacgtaatttgtccattgctgcatcaacattgtttgctttttgttcattaccttgtgcttctgcaacagtagtcgattgttgtaccaattgttttaatgcctctttttgtgcatttgttaaatggcttaaaccgtcaattgctgtatttgcgtgttgtttcgctttttcaaggttttgagtaccattaagcgctgcttttgtagtattcacttgattcatagctgcttcaacttgatctttaggcacgttcgtacctgtagatttatttaaaatattttcagcattacgaaccgcttcattgtatgcatttttcttctctggatctgcatctgcaaagttttgactgccaagtgtagtgtctttatcattcaagctatttttcaagttacccatcgctgtattcagttcctgagcggtttgaatggcttgcgttacttcagctacagtgtgcgcttgattgatgtttccagtaacagcacctttttgtgcattgtttaagttatctaacgtagataatgtttggtttgcattgtttttagcatctgttacttttctatcaccattcaacgcttgtttagtagttgttacagttgaaagtgctgcttcaacttgtgattggttcgcatttgtaccatttgcttgattaataatattttcagcagcagttaccgcattgttgtatgctgtttgtttttctggatctgcatctgtaaagttaacactttgtttcacttgatctttgtcttggattccgttgattaaacgttccattgcttgatctaattgttcagctttagttttcacttgatttactgtgctaatatttggtgcatttgtcacttgtgtatttaaatcttgcttttgagcattgtttaaatgacttaatcggttgatgttagcagttgtttcttgctttttatttgctaagttttgcgcaccattaagcgcagttttgttagtgttcacttgattagctgcttgtgttactgcagatggatcaagtgttggctgactcgttgcattaatgatattttcagcacttgtaactgctgtattgtatgcattttgtttatctgtatctgcatcaacatatggttgactcgcttttacttcatctttattcgcaatactatttcgaagttgattcattgcattgtcaagatttgttgcattgtctttcacactttgtacaccagttacttgtgtcgcgctatcaatttgaccagtaatactttgtttttgtgcatcagataaatgtgtcatttgacgtaatgcatctttagcttgttgcttcgcagttgctaagtttgtatcaccatttaaacttgtttcagcattattgacacgttgtgttgccgcagtaacatctgctgcatttgtaatcacattaggtgaaccatttacgatattcttcgcagcattatatgcatcagtgtaagcaccttgtttatcaggacttgcgttagtgtaattaccaccagctacaattgtgtcatgatcaccaattgcttgttttaattgatccatcgcattattaagtgatgtagcactatttttcagatcagttacacctgatacgcgttgtgcagcattcacttgttgtttcaatgctgttttttgcggtgtattcaattgtgtcaagttatcgatagcttgtgtagcttcagttttagcgcattgtaagttcgcgtcaccgttcaaagcattttcagtagacgttacactttgaattgcttgttcaacagcttgcttatctttattcgtaccatgatctttatttaagtaagattcagcttgtgtgatggcattatcaaatgctgttttcttagttggatctgcgtcaatgtagttttcgctcgctttagtttgatctttatttgcgattgctgactctaatcgttgcattgcaccatctaagtcttgtgctttcgttttaacactatttacaccgttgactgttgttgcaccttcgatttgtgatgttaaatcttgtttttgtgcattatttaagtgtgttaatgtacctaagtttgctttcgcatctgattttgcttgtcttacatttgcatcaccgtttaaagcattcttagcagtcgttacttgatttaatgcagcttcaacttgtgcttttgtcatattttgaccgtttgctttatctaaaataccttgagcattcgtaacagcatttgtgtaagcatctttcttaccttggtcagcatctgtaaagttcacttgttgtttaacagtgttttggtcattaataccattttgaagttgacccattgctgtatttaattcattagcagtattttgtgcagcagttacgtctgctactgtcgttgcattgtcaatttgactagttgctgcagttgattgcgcgttattcaagttactatatgaagctaatgcacgttttgctgtttctttcgcttgagcaactttattatcaccattcaagtcgtttttagcttgattcaattggttaagcgctgcttgaacttgtgtttcattcgcgttactgccatttgcattagtaattgcttctgcttgtgtaactgcagtatcatacgcttgttgttttggttgatccgcatctgtgtaattgacactacgtttcgtattatccttttcagcaagtgcatgtttcaaattacccatcgctgtgtttaacgatgttgctttatttttagccgctgtgacagctgcaagatttggtgcttgatccacttcagcatttgccgcagttcgttgtgcattgttcaagtctgtcaaacgaccgatatctgatttcgcagtttgttttgctgctgctaatttttcatcaccgttcaatgcagacttcgcactgttcacttggctcgctttttggttaattgtatcaggattcatttcagggttattcgttgcactaataataccttcagcattagttaccgcatcattgtatgcattttgtaaatctgcattcgcgtcttgataatcttcgcttgatttagtcgcatctttagaagcaatactttgtcttaattgattcattgcttgatttaaagtaccagcatttgcttggatgccttgaacaccagcaacagttgtaccacgttcaatttgttctgttaagtttgctttttgagcattagttaaatgtgacattgtcgctaattgttgtttagctgtgttcttcgcttcatttaatcgcgcgtcaccatttaatgctgttttagcagtattcacacgttgtaatgcttgttcaacggctactttattgtcatttgaaccagctgttttatctaataacgttttagctgctgttacagcatcattgtatgcagtttgtttatctctatctgcttcagtatatttctgagctgcttttgtagctgcttcgtcattaataccacgttgtaagttgctcattgcagtatttaattcagatgccattgtagacacttgatttacacctgcaactgttgtcgcaccttcaatttgtgatttcaatgctgctttttgtgcattattaattgatgtaaggttattcaatgcatttttcgcagttgtcttagcgttcgcaacattttgattaccgttcaattcgtttttagcacgttgtacattttgtaacgcagtttcgacaccgtcttttgcagtatttggaccttgtgctttatttaaaatttgttcagcttgcgtcactgcatttgtatatgcattacgtttcgcttcatctgcatcagtgaagttaacaccttgcttaatcgtattttgatcttgaataccatttttcaagttcgtcatagctgtatttaatgcgtccgcattattttgcgcttgtgttacttcattaacatgcgttacaccttcgatttggcgtttcgctgcatctttttgtgcattagttaagtcacttaagccattcaaatgttgcttcgcatttgtttgcgcagttcttaagttttcttgaccgtttaacgcttgttgtttagctgtcacttggtctttcgcttgattaatttcttgcgcaatcattgatggactagttgtttgaccaatgattgcttttgctgcagtgactgcattgttgtagtcattttgtttgttttgacttgcatctgtgtagttttgacctgctttaatcgttgcttcattcgcaatgctatctcgtagacctttcattgcagtgtttaatgtttgtgcattatcacgaacagtttgaacatttggcaacgtcgtcgcttgacccacttgttctttaagttttgctttttgcggaccatttaaagaagttaaaccatcaattgctgtgttagcattttgtttcgctacttctaaattatgattaccgtttaactgcgtcttcgcattcgttacttgcgttgctgcatttgtaacatctgatggtgttaacgttggtgttggtgtaccactaacgatatgttctgcagctgtcactttttcatcatatgcttggcgtttattcgcatcagcattgacataattaccactagcttttgtgtcagctttatcagcaatggcacgttttaaagctgtcatcgcagtatttaattcagtcgcagtatgttcaacaccatttgctgcagatacgcgtcctgcacttgttacttgtgctttcaatgcttctttttgttttgtatttaagtccgaagcatttgtaatcgctgtgttcgcagcctgtttcgcacgttctaagttttgaataccgtttaatgcagtattggcttgtgtaacagcttgcattgctctttcgacatctgctttaggtgtatttcctccagctgttttatttaaaatagttgctgctgcatttactgcttgagaataagccgttcgtttagcatcatcagcatcttgataattttgactttgtaacgtcgtgtctttatcacgaattgatgtttctaattgacccatagcaccatctaattgttgcgctttggctttaactgtattaacaccttcaacatttgttgcttgtgtaatttcattatctaacgcattacgttgtgcattattaatgtgtgttaatgtacctaacgtttgtttcgcagcagctttagcttcatttaatttcgcatcaccgttcaacgccgtcttcgtactgttcacattttgtaatgcttgttcaactgctgctttgtctacattttgaccactagcttttgttaaaattgcttttgctgcatttactgcttgatcataagctgatttcttacttggctcagcatctaggtatttctgagtttgttttgtttgtgtctcatcattgataccattttgtaaactgtgcattgcgttatttaattctgttgcttttgcagtttcttgatttacaccagctactgtagttgcaccatcaatgttacgcgttaacgcatctttttgtgcattgttaattgatgttaagttattcaagttgtttttcgctgttgtcttagcttgagctaagttttgcgcaccatttaatgcatgttctttagttgtcacttgtgatgttgcttgcgtaatagtatttggttccatcgttgggttcgatgtttgattaatgattgcttttgctgcagtaactgcgctgtcgtactcgttacgattatttggacttgcgtcagtgtagttttgacctgctttaatcgttgcttcattcgcaatactatctcttaagcctttcatcgctgtattcaacgtttgagaactatttttaacagtttgaacaccatctaatgtagttgcactttgaacttgttcttttaattttgctttttgtacattattcaattgtgctaagccgtcaattgtattgttagcatgctctttcgctacacgtaagttgttatcaccatttaatgctgttttagccgcattgacttgtgatgccgcactatttacgtcattgactgttaatgtcgcatttggtgtaccattaatgatattttcagcgttagtcacttttgaatcatacgcttgacgtttttcttgatcagcattgacataattaccgcttgcttttgttctttctttatccgcaatagctgctttaagtgctgtcatcgcaccgttcaattcagtagctgtatgttgaacgttatttgcatcagatacacgttgtgcattgttaacttgtgtttttaatgcatctttttgtttttggtttaagtcttgcgcgttgttaattgtgttcgtcgcatttgttttagcttgagctaagttttgtgcaccatttaacgctgcttttgttgtattgacttgatttgccatgtcattaatcgcattagcatccatatttggattgttcgttgcattaataacaccatttgcattatttacagcagtattgtaattatttttgttgctatcagatgcatcaagataattttgacttgttttcgtcgtattatcattttggatacttgtacgtaatgcacccatggcagtatttaatgtattacctttatctttaacaccatttacaccaactacattttgcgcttgttcaacttgatgcttcaagttgtctttttgtaattgtgttaagttaggtaaaccattaatcgtatttgttgctgaagttttcgcatttcttaagttttcagcaccatttaaagccgctttcgctcttgtaactgcatttaatgcattatcaacgtctgctttagatgtgttaccacctgtttgtttatttaaaatgccttcagccgctgtgacagcttgcgtatatgcatttcgttttgattcatctgcatcaagataattttgatttcttaatgtcgcatctttatcattgattgcaccttgtaagctattcatagcgccgtctaatgtattggcatttgtttttacagtattaacgccatcaacagtcgtcgcttgattgatttgaccttctaacgcagtacgttgtgcattcgtaatatggtttaaagtacctaagttttgtctagctgccgctttcgcttctgccagtttagcatccccattcaatgcatctttcgtacttgttacttgttgtaatgcacggtcaactgctgctttatctgaattggaacctgtttgtttatttaaaattgctttcgcagcagctacagcttgatcataagcagttttcttactttgttcagcgtcacgatatttttgagtttgttttgttgcattttcatcatcaataccatgttgtaattgacccatagctgtattaagttcatttgcagtttgttggatacttgttacatttgcaacacgttgcgcacttgtaacttgtgcttttaacgcatctttttgcgctttatttaagttagtagcaccatcgatggcatttgttgctgtttgtttcgcttgcgttaaattatgtgtaccatctaatgcatttttcgttgatgtcacttgtgtagcgatttggttaattgcattagcatccatatttggattgcttgttgcattaatgacaccattagcactatcaacagcattgttatagtttgttttgttacgttctgtagcatcaagatagttttggccatttttcgtagctgtgttatcttgtatgctatttcttaacgtacccatagcaccatttaatgtgttggcacttgatttaacagtatctacacctgcaacattttgtgcttgttgcacttgttgtttcaatttatctttttgtgctgttgttaaatgttgaaggccgtttatagtagtgtttgcatttgatttagcttgctctaaattatggttaccatttagggcacctttcgcatttgtcacttgtgacaacgcgttttcaacggcagctttatctaaatttgatccactatttttatttaaaatattttctgcgttcgtaacggcttgagtataagcagttttcttatctgaatcagcatcatgatagttttcgctcgctaaagtattcgctttatcattaataccattttgcaagttagccatcgctgtattcaattgtgtacctgtattagataccgcttcaacaccagctactgttgttgcttgatcaattttagttgttaagtcacgtttttgtgcattattaattgacgttaagttatttaatgcatttttagctgcattcttcgcatttgtaacgttttgatcaccattcaatgcatttttagcacttgtaacattttgaatagccgcttcaacatcttgtttagacgtatttgcaccttgcgttttattcagaattgtttctgctctgcttaccgcatttgtataagcatcacgtttagctttatctgcatcagtgaagttaacaccttgtttaactgtgttttgatcatggatagcttgttccaagttgcccatttgcgcgtttaactcagttgctgcatttttagcagctgttacctcactcacatgacctgcacgatcaatttgtgatgagattgcagatttttggttatttgttaagtgtgataacgtatttaagttttgcttagcagtgttttgtgcatttcttaagttttcagcaccgtttaaaccatttttagcattattcacttgtgttgtagcttgggtaatcgcactagtatccatagttggattgttagtttgattaatgatacctttcgcatttgacacagcgctattatatgttgattggttattcggacttgcgtctgtatagttttgacttgctttgactgttgtttcgttagcaatactatatcttaagcctttcattgcattgttcaatgattgtccatttgtttgaacagattgtacgtcttctaatctattggcttgtcccacttgttcttttaatttagctttttgaggagtatttaattgcgttaatgcatcaatagcagtattggcgttttgttttgcaacacgtaatctttcgtcaccatttaattcttgtttcgcgctgtttacttgattagctgcagctgttacttctgaaggtgttgtaacaaccgttggcgtaccgctaataatatgttcagcattggtaactttagttgtgtaagcattttgtttagtgctatcggcgttgacatatttactgcttgctaacgtattcgtcttatctgcgatggcatgttgtaattgacccattgccgtgttcagttcagtcgcattacgttgtacatcatttgcattagatacgcgttgagcaccattagcttgtgcttttaatgcatctttttgtttttgatttaaatcagatgcgccattaattgctgtaatcgctgcttgtttcgcattatttaagttttgcgtaccatttaatgcatgtttcgcactattaacattattaagtgcttgttcaaccgctgttttcgctgtattcggtccagtttgtttatttaaaatggtttcggcagctgatatagcttgattgtaagcattacgtttttgctcatcagcatccaagaagttttggctcgctaatgttcctgacttatcgttgatagccgtttgtaagttacccattgcgccatctaaactatttgcactttgtttaactgattcaacaccagctaagtttgtagcttgtgaaatttgatttgttaaatcattgcgttgtgctgtagtgatatgcgttaaagtacctaaatgttgtttcgctgcgttttgagctgcaattaattttgcatcaccattcaatgcatctttcgcagtattaacacgttgcaatgctgcttcaactgcattttgcgcagtgtttggacctgtcgatttatttaaaatcgctttcgctgcagtaatagcattatcatactcttgttgtttatttgtatcagcatcacgatatttctcagatgatttcacttgagattcgttgttaataccattttgtaagttagccatagcttgatctaaatgttgtgcattttgttttacagtatcaacaccactcactcttgtcgcactactaatttgactaatcaaattgttcttttgagcatctgtaatactcgttaatgtgtttaagtacgttttcgcattttgttttgccgtagctaagttttcatcaccgttaagtgccgttttagaactattcacttgctctgctttttgtgtaatcgtacttggattcatttctggattactattcgcattaataatcgtttcagcagcagctaccgcgttgttatatgctgtttgcttatcattattagcatctacgtaatcttcacttgctttagtcgcatcattgttagcaatactttgtcttaacgtattcatcgcttgatctaatgtgttggcatttgattgaaccgtatgaacaccagcaacagtagtaccactattaatttgatttgttaaattcgttttttgtgcagttgttaaatgcgtcatattatttaactgctgtttcgctgtttgcttcgcttgatctaataaacgcgtaccatctaagttatttttagccgaattcacttgattcatcgcttcagtaacttgatctttcgttttattttgaccatttgatttatttaaaatatctttcgcagcttgcaccgcatttgtgtatgctgttttcttactaggtgtcgcatcttgataattttgactattaagcgtcgtttgttcatcattgattgcaccctgcaagttacccatcgctgtatttaaatctgtaccttgttgtttaacggtatttacaccagcaatatttgatgcagcattaattttagatttaacatctgctttttgtgcattatttaaatgtggtaatgcatcaattgctcttgcagcatctgttttagattgtactaatttttcatcaccatttaatgcacttttattagtagtaacagctgaagttgcacgattaacatcatcaacagacattgtcggattagctgtttgattaataattgtttcagcacttgaaactgcactgttatatgcattttgtttagctgtatctgcatccgcataatcttctgtacgtttcacttgatctttatctgcaacagcttgtcttaagttacccattgcactattcaagtttgttgcattttgcttaattgtattaactgcatcaatttgatgcgcaccattaatttgcgattgtaagttttgacgttgtacattatttaaattgtttaaatgacctaatgcagtattcgcttcttgtttcgcagcatttaacttagcttcaccattcaatgcatgttctttacttgtgacatttgataaagcattgttaacatcacttggtgttataactggatgttgtgcattaccattaataatgtcattcgcatggttgtatgcattgttgtaatcatttttcttattagtatctgcgttgacataattatcactttgtacgacttggttatgattagcaacgccacgttttaaacctgtcatagcagtatttaagctttgagtcgtttgtttaatatcatttactgcttgcacgttttgtgcactattcacttgttgtgttaatgcattcttttgtgcttggtttaaatcacttgcatgcgtaatcgcatttgttgcttctgttttcgcacgttgtaagttttgttgaccatctaaagcatctttcgtcgatttaacagatgctgctttttggttcactgtgttaacatccatcgttggattagtcgtttctccaatgacacctttagccgcattaactgcattatcataggcttgtttattagctggtgttgcgtcagtgtaattttgacctgatttaattgtattattatccgcaacactgtcttttaatttcgtcatcgcagtatttaaagccgtaatgttagacttaattgtttcaagcgcagcatgattttgagcagcattaatttgttgcgtgaaattattttgttgtgcttggtttaagttagatgcaccatgtaatgttgttaacgctggctgtctatctaatgttaaaccttgacgtgctgtatttaattgatccttagcttggtttgcctctgccactttatcattgatattttggacagttgggttgccattcaacacttgattaatttcagttaacttttgacgtgctgcttgtaatttttggttgtatgcatttaacgaagcggttgtcatacctgttgtatctgttggttgattaatgctttgttctaattgcgttttcgcattttgaagcggcgctttatctggtgttaacgcttgacgtgcatgatctaaatcagatttcgcttgatttgctgcagacgtatttgtattaatttgatctacagtaggtgaacctgctaatacttgattgatttgttgaaccttattacgtgcagctgttaacttcgcattgtatgcatttatagagtcttgtgtcataccagttgtacttgtttgcgtatcaatactatgttgtagttgatttttcgcattttctaaaggtgctttatcgactgttaagccattgcgcgcttgatcaagtgctgttttagcagcattcgctgctgtcacgttttgacgaatcgttgctacatctggatgagatgctagtacgcgatcaatttcttgaattttagttctagctgctgaaagtttgtcattaaatgcagcaacagatgcgcttgtcataccagtcgtactcgttggctgatcaatatcattttgcaactgagtttttgcagtttgtaatggtgccaagtctggtgttaatccagcaattgcttgttttaagctattatatttttcttctacttttgttttttctgcggcaatttgttggtctgtcgcgtcaccattgttaataacattttgtgcatttgttgtttctgtttgacctgcacgtttagcattttcatatgcttggattgatgattgtgtcataccatcagtagttactgatttattgatttcttcatcaagtttcgtcttagcagttcttaaagcactattatcagctaaaggtactaattgattaattgcttgcgttaatcgctcattgacacgatttacatttgttaacgcagattgtacctcttgcactgttcttattggcttctgaatgatagcattagcgctatttttagcacttgttaagtcactttgaagtgcacgaatcgaattattgtaagcagtaatacttgccggcttcttaccagtcgttgtacctgtgcgattcaattgttgcactgcttgctctaaggcatgtgtatctgcagttaaatcatgtttcgcttggtttaatgctgttaatgcgttatcgacacgatgtttttcatctgaaatttgttgtgcagttgcatcgccattgtcaataacacgttgagctgcagttatttcagtttctgcttcacgcttcttcgcattatagttatcaatactttgttgcgtcataccagcagttgatggtacttggttcacagaactttgtaagttatttttagacgttactaattggctattatcttctttattttgaagtaatgctttagcttgatcaatcttagtttgtgctgcacgaactttagttagtgcgtcagaaacttgttgtggtgttgcacgctcattattaatcacttgttgtgcttctgttttcgcggtattgatttgttgttgcgcattatgcattgcattattgtactgcgtaattgtacctggctttttaccttcagtgcttactggatcatctaaatgatttttagctgtgattaactcacgtttatccgcttttgtgaaaatggactcttgtacttcttcagtactaccatcattgtaagttactgtcacaggaatcgtcgttgtgctaccaccagctaaattagtaggcattgctgtgccatttttaatcgttgcagtacgtttattagcaacttgaactgcattgttaatttcagctgctgttacatttgaaccataatctttcacaatttcagttgtgttgacagtatgagctgccggtgcagttaatgtacttggattactacttactgagtgacctgtacctgctttcggagtaattgtgattgatgaatttggttttatagtattggcattgaacgtcactttaccagtttgtgcatctaacgttacatagtcaggcttattcgcaattgtccattgattattttgaccacgaacaacattaattgtcttactatgttctgcaccattacccactttttcagtgtaagcaatatccattgcttgtgttggattaattaaatgtcctgatggattattaggcgtgatatcaatatgaccattttgccaaattttcgtagtcgcttggttcggttgtggtgcgacaactgtgaaatcatcactacgttgctcgtcactgattgtttcgccactaccttgtgttgcaacaacttgaattgtatcagcaggattgaaagtacctgctgccacagtaataccattattagttccaacaatacctgttacattatctgctgatgcttctttcacccatgggctcgtattattacgacgtgtaaatgtcgttacaacatttccattacgtttaataactaatttgtcagcatatgtcgtaacattaccagcatgagtattgactgtttggttcgcaccaggtgcaattgtaatcgctcctgccgctgtttcagtgacagttggtttcgctggttgaacatcttttactacaaatttcgctggtaaagatgttgcaaatgtatgtccattatagatgacatcatattttgcattaacgacttgtgcagtatttggtttattcattgctgcccagtttgcatcgtttgtacccgtagtatcacgattccatttatacgtaaatccatctgttggtaaacctgaagcgttttgcatatgtgcatatcctgatgcttgcgtaccacttgctaaagtgccaccaactgttgttgtataagtagtttgagggaattcaaattgatatacgttcacagttacaggaactcgtttagcagctgaaatacctggatatgtgacatcgacatttaaatgttgaacgcctgcttgctggttatttggttgttgtctatttgcccatgctgctgtaataccattcgtattagtatttggatcaaatgtaatgtaatcaatagcgtttgtaccatgtgtcaaattttgacctttcacatcacgtgatggcgccttagcattagcaactggataaactttgactggaacttcaacattacgcgtaccttgaccactaggtaatgttacaaccgcagttttatgtgtgttgccgactgtattcttccatgtatctggactatcatgccatgcgaccgttgccccatgtggcggattttgaataaatcgttctacatgaccgaaatcaaaaccgtcgccacctttaataaatacagcgccttcagtagttgcttgtaattgtggtgttactgtaacagaagcactatcatttgaatcaacagattcatttcttgttactgtaacaacttgaccatgttcgtcttgcgtcgtatacgtcacattgttcattgaaattgaagattttgctttaattccgccatttggtaacgcgtcacttactgtcacaaccgaactaaaaccactaccatgagtaatatttgtgacatttaatggtgtattatctgctttaaataattttactgacgagttatttaatacgttattaactttaatttcttggtttgtaagacctgctttatatgtcacagagtttgcgtcaattcttggtgggtcaggtttaactttagataaaatagttaaatcttcagtttgtctattatcataagtcactctaataagacgcgttgatatacctacaacatctttgttaggaccatatgttccaacaaattgaaaattcatatgttgcgcatttgtcgaccaagaattatttactggcttaacatattgtttcgcatcatacatatctgaaacacctgggtataaaacacctctggctgtttcaaagacatgtttcggtacagttcttactactttatatgttgctgttttcgtaatcggcgttgtttcgccatcaattaagatatgtgcagttactgttatatcttcaccaatacgtgtattatctttatttggcgcttgtccacttacccatgtaatcgttgcatctggaatggcactaccattagataacttaaagtaatctgctgcactagaaccattacctgctgggaagtcttggccttgtacagtgtaatgcgaatgtgcaacgatttctggaatgacatgctttacaggtacagtcactgttgatgttgttccatcttgatgagtaacagttactgtgacattggcattatttccagtacgactgacattactaactgttttactagtgatttcatttgcgcttgctgttgcatagtttctatttggtgcattacttgtaaacgttaacgaattaataattgtcgtttgatcagcttgtgatactgtcgcattattcgaaatattggcaattctaacaggattagcagccgttgatgaagtaccaactcgatatttatcacgcaaaggtttcactgttacattgaatgaagttgtagctgtattaccacttgtatcagttgctaataaattgattgtcttactagttgctgatgtcacatttggtgccgttgcagaaacatgttgatggttattatcaacagtacctgtaatttgtgatgtatttggtacagttaccgattgcacaccaaagttatcattcgctgtaatcgtatttgtaaatgtttcacctgagaacacttgatgattagtgtaattacctactgaaattgttggattcactaagtcacttggtacaaaataaatgttaatagcgtcagtagtatttcctgtattttgatttaaatgttcaacatattgttttggaccatatggcgttaagtataactgcgctttataaactgcatcacttgcattatgtgtagaattactttttacaacgtggtcaattgtaaatgcgccagcaccattagctgccggttcgtttacgttaacaacagttgagttactatggtttgcacgagtatttgaatttgtaacaggttgcccaccataaccgtttgaagggttgatgatgtctaatatttgaatcacttgaccattcaacgtaaattgacgttgaccatcagttgtcgcatttgattgtgaataaccagttgttctatagtttggtcttccacctgcttctgcttgtgctttttcattaccagtaatattattacgcaatccaggcactgtagtagtcgcttttagcatcgttaaaatatcattagttgtaatttgtgtgcctaatgtagcatcataacgataaattaaagatttatggtcatcggaccatgataaaccaccatctgttggtctgtttgcaatttttgcattcgtccatgtcactgtataatcttgtgggaaattaacccaacgcaagaaattcatattagctaggttagacgcgaatgatttcgttaatcgacctttattaatatttactgtaatagtacttacattagcaccattaggtgtatttgtaactgaaatatcaccttcggcaagcgtaattacatctctatttgcattaataaaagcttgttttacttttgagatttcatcagtggttaaatcatatgttgacgtacgatagacacgttgatcgccttcaggttgtttcacatcaacgatttttaaactaatatagaaatcttcagtgtctttatgatatgcatttgaagcaactatatgatataactgcgtacctgcattcatttgactaacttcttgtgcagttggaatagttctatcagatgtaatatttgtaaatgtgccatttggaatagcttgtccattacttaaagtaaaatattgtttaatatcaccaatattaaatgattgtcctttagcaatcgttaccgttgctgttttagcagcattggcagtttgatattcagatttcacaactggttcgtatgtcatcacatttgtagcatcaagcgttgttgatgagccatcacggtaatgtaatgtgacgttaccattattatcgacagttactggatcagttgatgctaaatatcctcttatattttggtttttattcataaaggcagtaattatgctttgcttttcatcattagatacagcagtcggattgactactacaactttctcagtatttcctaatacaatcggatgagcatcttcactaattttacctacatgaattgacacatgtttagattgactatcatttgtcgtattattgacattgtctgtcgctgatactttaaatgtaatatcactgttaaatgcctgattcatagagactctacctgtaatagctaatgagccgtttttgttgtcggatttagttaaatttgatgtccaaccacttggcaaagtagtaatagttgtattttttataccagaatgtctatcagagactcccattgtaaagttgacttcgtcgcctcgatagtatttggcatttattccaacaggattattgattgttggtggaatgtcatctggcaaaatagtaacagcattactcatattagatccaactactttattataataaactactgctctaatttgtttacctacaggtggtatgaatacaacataatcttgcggtcgtatagtaactgtattatgcaccccatcaggtgtaccagtcgcaagtatcgtataaccagatggtatttgatctgcctcactaccaccattcgtagtttgatttgttggtgcaactaaataaaccaatgccgatggatccaacggtattcccgaaatattaacaggcactttttgtaatgctgtacctcttaattgctcagctgtcgttgtaattgttggtgtatgtggtttaacacgaatttcaaataattgttctttacgtccaaaacgtatcgtaccaaagtaatcccctggtaataaattaccaacaagttcaatgttacgttctctagcattattagttctatttgtcgagttttcaatgtgtaatgtacgcggaatacctgtaatttgccaatctttatctgtaaaattctcattacttgttaaattaatacgtaatggttgaatagatgttacgctaccacctaaattcacggaagcattcccttggttacctgcatatacatagaaaactggatgcccagcttgttttgaaaatggtttttcagcaatattttgagtatcgtcatttttaaagaatttaatattatgttggatttcaggtaataccgttaagttaacaggaactaaagtttcactattaccataaccatcaggatagtcgaaaccaatcattaatcttattgggtttctagttcttgctgcttcttgtaatttttgatcagtaaataattgacttaattgatattcatttaattcttgaacgccccccggtctaaaagcgttagtatttgcattagttgggtaaaaacctaacactttattactcggcgtcttaacataacttaaaggatcatcaacaaaatcatctatatttaggtttgtactttctaatacctttttcgtttgtacatttccttgactcacttctacacgtttagttgtacctatgcgatatgtacgattaaccacttgtcttaaaccattaagacgttgttgatggtcttgcgttgattcgacgtatagttgactgtacataaataattgattgtactctaaagcacgcccacctgctgcataatacaatttattaacagttggaccttgtgttttaaatgaaattgtataacttgcatcaccttgaccgatgaaagtataaactttaggaacacccggtgattcagcaggtttttgaccattaatatattcaaaattttgtctaccaaatgctttagtagcaggtgtcgctccagcttcactaaaataatcactcgctctagataaatcttctaaagaataaacatggacagttggccagctatatattacttggccacttctatttcttattttaaagtcatgtgaacgatcaggatcatttactccatattcccacatttgttgaagtggtttatttgcacctgctcctgctccatgactccattgtacatttgttccatctgaattaactgttacaaagtcagttcttcctactggcacttggtctgctggtaatgcaaaccagaaaatcatattttgatgtggagcatgtcctttattaaacttaataacccattggtagccatctccagtttgtttcgctgtcataagagcaatttcctttgagtcagaggccttcaatgtattccatggtgtagttggtaaattatatggcgcccctttactagaagcattgatatatgtacctacaggatatcctgaaccatcattagcattttcaacataatatgatgaatttgcattttgatagtctgatactgatctaggctctgcagctctagactcaacagaacgcgtttgaattctgtttgatcgacggctagtttgttgacgttgaggcattgtacgaattaaagcaacagcttgttccaattctttgtatgcaagttgcaagtctttattgttaattggatcattactgcctaataaagtattaatcttgtcaaaaatgccttttacatagttaaatgtgccagaatctgcattttcacggtcaataaagcgataatcatgataatttgcatcaaaaaatgcttgtaattcatttcggtcatgttgtacgttaccattatcagatgaatctgaagctgttactacatttgcttcatgattttctacatgagccgctctattgtcgtttccatttttattagcagattgactttcgttttgtttatgcttactttcttctttatctggttgtgttgtcgcagccgttgccgaatctttctttgtatttacattttgagatgctggttgttcatcattagtagtagatgattgcgctactttttgatttactaaattagcttgactattatttggttgctcattttcatgagtagcggataatgattgactattttgtgaattttgagaattttgtacttgagattctcgattctcagtctgttcattattactttgttgtttctgtttaaccacgcttgctggttgatttgtttcagcagcatgtgcttgtgatgtattgaatcctaaaaataccaatgtcgcaatgacagttgaaaatgtaccaactgtatatttacgaatactaaacttttgaattttatcacgataattcacagctattgttcactccttatcttgttgttatgtctctgttgtgttgtgaatgtatttacttttgattgcttgtatattgtaatgctcattccattctcatttaaaaatttaaaacgatgacgattcaatacaatttcgcaatctatccaaaaagtattgaaacacattacaactatgtgttgaacaatttatttatgctccagaatataataacacaaaatatattgtaaggtaaattgaatttgtgacaatttataataattataaataaagtagcgtaaaagagtaataaaaaaccaatccctatgttcatttaaaataatgacacataagaatcggtttatatttttgtttaatattgtagcgacttgtatgatttcaatttaattctcaattatcataattgagtgtcgttttgtttaggcacaagtaacaaaatgataacgaatgataatattcccatacctgcgtttaaccataatgcaatcattgcaccagtataaatgtttgtcatatttgatacgattgcataaactgcaccactcaatgcgacgccaaatgctccacctaatgcagaagccattttatagatacctgcagcaactcctactttttctaacggtgcatttgcaattgctgtatctgttgatggtgtagcatatattcctagtcctaaaccaaagaataaataacctataatacaacaaatgacatacaatatttctggcaagaaagttaatgaaatgagacattctccgacaataagaactcctgttccaattaacattggtttcttgcatccgagtgtttgaagtaacttttcaccaacacgaatcataattagtaccattactaaataagtgattgataaacttcctgcttgcaatgaggaatatcctaaacctctttgaacaaatgtgttggctactattaatgttcccgcaacaccatttaacaaaaagtttgaagctgttgcacctgtataagctttatttttaaataatttaaaatcgattaaaggatttgtagcacgcttttcaagaactataaataaactaaaagatccaattgcaattgctaataaagtgataaaaagaagtgaggttacacctaattctgatcctttagtaattaaaatatttaaagtgaggagcataatgactaaaagaaccagacctttaatgtcaaatttatttagagaaatcgatttagatttagtttcaggtgtgcctttaataagaaacagcgcaattaatgaaattataattgataggatgaaaatccaacgccaacctaaaagtgttgcaactgcacctccaaaaaatgaacaaacaccagagccgccccatgagccaattgaccaataacttaaagcgcgttgtctatctttcccaatgtaatatgacttaataatagacaaagttgcaggcataatacatgctgctgaaagtccttgaattaatcttcctataataagtaataaaggaatatttgaaataatgattaataatgaacccaatatatttaagataataccaatgttcgtgagtttaattctgccatatttatcagcaagaccacctgctcctacaacaaacattcctgaaaataaagcagttatactaacggcgatattaaccgttccaatatctgtattgaaactatcttcaagtattggtacaacattaaccaatgattgtgcaaatagccaaaacgttattacacttaaaacaattcctattaacaacttattattgccttcaaatgcctctcttgacggcttttccatctctatttgcctccctatacttttgaaaacagacaaattccataacagaaatttgtctgttcgatagaataattgaatggtttttgattttaatgtgtaaaactttaaatttattagtagtccatccatttattctcaatgctagttatcttaccttatgctgctttttgtttcttcttatagtaataaactggtataccaagtgctgttattagaattccaatgattgctaatataaattgtgtaaacagtgtattaatcaatacaaatgatcctgccaaaatagcaattaaaggtatgatcggatataacggtactttatatggacgctccatatttggttcacgttttcttaaaattattacagcaacaaatgacatacaatagaacaaccaaataacaaagattaacatgtttgttattgtatcaaatgctcccattgacatcatgatgatagcgattataagttgtataattgcgccaaaccatggtgcgccagattttgttaattttgcgaataagtggctaaatggcaataattttctttcagccattgcatatggtacgcgcataccagtcatagtatagccattgatcgtaccataaacagaaattaatataccgattgtaataattttaccgccattttcaccaaataatatttttgatgtatctgaagctgcatttaagttaccagcaagtagttctattggcaacgttaataaaaatgtagcgttaattaataaatacacagccataatacaaccgataccaactgaaatcgctaaaggtaaatcgcgtttaggatttttaagttcccccgcaacatttcctacatgaatccaaccatcatatgcaaacatagttgctaataaaccactaccaattgctgtaaagaaaccatttcctgaattacctgtagttggaattaatgaaaaagtgatatctccagattgaaaaataccaaaaattacaataacgatgattggaatcagtttaattactaaagtaactgattgtaaaattccgcctgcttttgaacctaggaaatttatcaacacaatagataacgcagatgcgattgctattggtattaacgaacctatagataaatggaataaattaattagctgtgtcgcaaatacgatagacaatgctgctacgttagctggaaaataaataaatgattgcgcccaacctgataggaagccccagaaatcaccgtatgtatattctatatacttcgttaagccacctgtttcagggattgcagcagcaagttctgctgctgttaaccccgcacaaatggtaatgatgccgcctaggaaccatacaaacaaggccattcctgctgttcctgttacttctgttacgtttgatattttaaagaatactcctgaaccaataactgtccccataacaatagcaaacgctgagaagaaacctatatttttttgtaattctttaccatttgacataattacacctcatttttaagattggaagttttaacctaccacacccttacttgtatccgcgatatttaagccatgttcaatgacaccagaaactctagttaagtcaacgtttcctcctgaaactaatgcaacgacatttttaccctctagccattttttatcaattttcccacttaaaatagctgctgtaggtaaagctcctgcaccttctgtaatgattttggcacgttgcattaaatcttgcattgcatgttctatttcctcttctgatacaagaataaattcatctactaaatgttttactacttcgtatgttttttcacctggtacttttacatcacaaccatctgcaattgtgctatcttcacgatgttcagttaaagctctcttatagaatgactctgccatgccatgcacattttcagcttgaacgccgattatatgaattgatgggttgaatgattttaaagcggtggcaatacctgcaattaggccacctccaccaactggaacaatgaccgtattaacattccatatatcatctaaaatttctaatcctattgttccttgaccagccatgacaaacttatcatcatatggatgaacaattgtcataccattttctttcgctaattcttccatataaagtctagtttcattaaagtttttaccttttaaaatgacttttgcaccatatcctttggtagcattctgtttagcaattggtgctgtttctggcatcacaatcgttgcatcaatacctaatagttttgctgtcaaagctacaccttgtgcatgatttccggctgatgcgccaataatacctttagctttttgttcatctgacaaatgattaattttattgctagcacctctaaatttaaatgaacctgtaaactgcatattttcaagttttaaatatacgttacctttagtgatattttgacttaaatacatagatttaattagtggtgttcgacgaataaatggtttaatgcttgctttagcttcttcgatatctcctaaacttacaatatgtgctgtttgtaatgtaactgtgttggttgtcataataattacatccttccgttttgtaaatttttagtccaaactataatgctatatttaaaatattcatttcactcaatttcatttaaattattatctattcgataacatttaatatttctttataatctaggtcatgtgatgaagctaatccttgatttgtcacttgtccttggtaaatgtttacaccagtacttaaggcttcattatctttaattgcttgttctaagcctttgtcacaaatttctaatatataatcaatatttccttgtgctaatgccattgttgaagttcttgggactgctcctggttgatttggtacaccataatgaatcacaccttcttcttcatacactggatcagaaattgtagttggtctaattgtttcaatagttccaccttggtcaatagctatatcgattaatactgaaccttttttcattgatttaaccatctcacgagtaaccaattttggcggtttcgcacctggaattaaaattgtagaaataaatacatctgctttcttaatttgttctgctaaattttctggtgttgatttgactactgtgacatctttttctgcatacatatcttcaagatatttaatgcggtcatcgtttaactcgataatgattactttagcatttagtcccaaggcaacatttgctgcatttgttgctgctacgccaccaccgaaaatcacatatgtactaccaggtatatccacattttcatgtacaccagtcactaaagtaccttgaccaccatgttgtgcttcagagtagtaagctcccataattgctgagcgttgacctgctatagcactcattggcgctaataattctgcttttccattttttataatggtttcaccactaatcgcagttacaccaacttcttgcattttttctactatttcttttgaagatgctagatgtaaaaatccccagataatttgattctttttgaaatattgatattcgctttcatgaggttcttttactttgataacaagatcagcttcccatgcttgttcgtgagttacgatcttagcgccttctttttcatacatatcgttagaaaatcctgaaccaatgccagcatttttttcaacaattactttatgtcctgcatccgttaacttacgcacattttcgggtgtgcaagctacacgtccttcaccttgttttaattctttgactactgcaactaacatttgcaacactcctctttcatttgtgaataatttcacaattattttatcctttggttatgaatatgtaaataccattaattaattattcatattttatctataatttgttaataaatatttaatatattattattattcttaaatattatgtgcaattataccactatatttatttcttatactccatttgatttatagttgtattaatacattgactcaaaaactaattaatcaaatatgttttttagattaataaagttgtaactgtactattttgtagtgtatggtaatttatttggatgaaatataattctttaaactctattgattaatcaaatatgtatctatcaaaattcgtcttatttattcactctgacatatccaaatacgcaaaaagactatttctaccttgcatcgatagaaatagtctttttatacttaattggtttaatttttcataaaattttatacttttttaaaaatgggatgaaatatattttcctgaaacatgtaattcatgttcgttacaaattgataaaatatgattaagtgttgttgcaaatgacattttctcaaaaagcgcttcactatcaattggtacttgtgtgtgaatttcagcaagtcgcttcgataaatatagttcatctaaattgtcattaatcttattacgttgcccagctgataatgcatcaatgttttcaaccacattttcaacgctttgatattgctgaattaacttaatagccgttttctcaccaattcctttaacacctgcatatccatctgctgtatcacccataaacgctttaatatcgattagttgttgtggttcaagggcatattcttcgttaaaacgatgtaatgtatatctattataaatgttaaaaccttttttaattagccagacttcaacattgtcattaatacattgcagtaaatctttgtcgcccgtaataatatagacatcgttatcagttgaatattgttgtgctaatgtacctataacatcatccgcttcatagtttttaacgccaatatttacaaagccaaattgctctgaaatttctttaacataatcaaattgtggtatcaattcttctggtggtgcagaacgattttgcttataaccatcaaacatatcatttctaaaagttgattgtcccatatcccaacatacagctacatgtgtagggcgtatttcatgtattgccgaaaagatatgacgcacaaatccttgtattccatttgtaggtacaccttgtgaattgtacataaattgtttatgaagacttgtagcatagaaatgtctaaataatagcgccataccatctacaagtaatattttattaggcatttaaaacgttccttctttcttaatataaaatagttttcagttgttgatgtttatctttcaattgattgataagtgttgtatctaaatcaaatgctaataaatcgtttatttgcgtttgaatattagcttcaaaactttcaaattgcgattcagcttctacagccatttgctttacatataattcaagctgttgcctcaataatcccatttgtggttgtaataatcctaacgtactttgacaaattgattcatgtatatctctttgcccatttggattcaaaattttacgttttgttaattgtttaggcaatgcatttagcatatcattgaaatcgatgtgcaataatggttgctctatattagctgattcaaagttaaactgaggattaacaatgacatgtaaatctgctaattgttgaacgattggtgcaatttgcttagtgagttgcttattaaagtatttttttatacgttctgtaattaaagattgctctaaaaacaatcgttgatgaatttgatctaagtatactttcgtagacactttcttttcttcattaaaatcactattttgcgtcatttgagaattaaacactgatttaacatcgtcaagtagttgtaattttaaacgtgcatttaaatgataaacttgttcttcaacttcgttgtctgtatgttgtagcgtcgcatcaattaattgatgttgtaaacgctgtttatctttataatctgttaacctttgttggcgacgtgaaatatcagctttatttgtttcaaattctgtaatcatctctacataagaacgatccatttgttgaagctgatgaatcatttgttgttctaaaattgatttagattcaacatcaacaaattgttgtatgctttgttttaattgatcaatgcccttatcttcagcttgcaatgcatttcgacttgatacagcaaaaatgtctgattgtaagtgtacttgtcttaatgcatctgatacatatgtttcaactgcttcaagatcatcttgactttctgctaaatcagcagcattaattaccattttaaatgcttggttttcattcaactggttcatatctttcatgtgttctataaacgctttgtcattatcagtaaatgaatgattaaaataacttacatacaatattaagtctgaagaagttaaaatttgttcggtttcatttgtatgcctttggttatttgagtgtagccctaatgaatcaacaattattttaccttttaaccaatcatgcattaatgcaatgtgtactgtcttaacaaatgttgcatattcatcttctgcactccactttttcaattcctgttgattaatggcatgtttttctccattttccaacatattgacatacaatttataatgtttttcaactgcctgaataaaagcgagttgatttttatttaaatgtgattttaacttttctaaatcccaattaataaattcttctatagttgaaaaagatatatcttggtattcaactactgcattaatttcatctaataattgcgattgtgattttagcgttatataactctcgtctccataagatatttctgtagtagctgctgtagtaggatttggagaactcactaaaatatgctcgcctaataatgcatttatcaaactacttttacccgcactaaatgttccaaatacacctatttttattaatttattatctatacgtgttaatgtttcgtggatatcttgctttgtacgcttgaacaaaggcacatccgaaattatatcaagcgctttttgaatatctatagacatatttgttgtagctgtattttgatttagctgctgattatcacgattatcctgagtattatcagtagccacttgatatgttgtctcttgtcgacctattaatttatctagagattcatctaaatgaatatagtagtgacgataattcttagtcgtcaatgactgacgcagctcatttaattctgtataacgttgatattcttttaaatcatcactttcttctgttggtaattcatctgcctgcacattttctattatttctttaaaaatcggtgttgattgttgttcaacatatttcttaatggctttaaccacttcgtctgaaaatgtaagtacataagtattgctgattgatgtttgtggttgatataaatcttcaatcatttccggtttaacgtcataatgctgatttaatactttatctgaagcttcttttttattgataaaacgcgttacaaatgacatatcttctcgcattggttgacgaatttgttgattaacatgttcttgtaacgcatctgtcgctgttaataatcgctgttgttgaatttgtagctttttcttctttttattaaaaaacccaccaacattaaaatcttgagacatactttccaaataacttcgtaacatttctctcatattatgcggcataatgtatgcattttctaaaatatttttacgcttattctttaaaaatgccattaattcatctggattatttaaaagttgtgcctcttcactaattgcttgatgttgttgactatttaaaaatgcttgttcaaactccgcttcttcgatacctaaatcttctagtacttcctgaatttcagactgaatgtaatctagctgagcttcggtaatgtattcaaccgttcttgatgtataatcctctattgtctctctatgttgatctaatgaaattagataacttgataatacttcaagttcattttcagggtgatcaaatttagatacataaaaggtgcgttctaatttaatgccccaatctgcaattgatttttcaactcgtgatttaaacgtagagaatgacaattcatcgtcttgatgcttgtcaatttgattaatgataaacacaacaggtattccaacatcatttatatgcttcataaacttaaagttaagttcagattgaacgtggttatagtcaaccgtataaaatatcatattacttgtatacatatattgttctgttattgactgatgtgatgcaacatttgaatcaacacctggtgtatcttgcaacgtaaacccattttcaaatttagctgattgaaaattaatttctacagattcaacgtcgacattttggcgattcatttcccttacttcatcataattagataatttggcatatgtttgattcggcaaattagcaataatatcgtgattgtctgaaactgacacaatagcagtattacttgtcgttggtacaggtgaacttggtaagatatcttgttcaattaataaatttatcagtgtcgatttacctgcagaaaaatgtccaacgaacgaacatgtatattgctgcaaatatactttcttaattacttggttaattgtatgtaaaagtgcttcatttcgcgacttttcaacttctttttttaatttatataaaagatctaattgttctttattaatcatgttactttcccctttggttcgttcacatagaaatgcttgcttgttaaaacgaattcatacaatatcgatgtccatttaaacatagatcgttaaatggctcgcattgtattatgtttaaattttatcatagctgcttgataaaacatacgaataatcaattttcttcaaacattccaacttaaaagttcatatttctaaaaatcacaaatcatcgttaaatttttctagaaaataaatattgtcacagtttgttcacacacgtcacagaattgacaccgtataatagccaattgggagggaaatatgaaaaatacatttaatccattacaaagattacatttctatgcagcaatatttattgctccactgttaatcactttaaccatttcgggcattggttacttgttctttccagaagttgaaaataatatttataagaatgagttttttggtgacagtgatgtaaaaacgcatcaaacattaaatgatgcagtacatcaagttgaacaacaatatgaaggattctttgtaagtaaagttagcatacttgatgaaccatataacaaacgaattacactgagtgatatggcaggaaatcaacgttacgtctttctagatcataacaatcaatttgttgcagatcaaaatgcgaaacatacgtattctaatgtgatgcgaagtatacatagttctttgtttactgaaaatactattattaattatttagtagagttaaccgcatgttggacgatattcatgattttatctggtacttatttactcattaagaagcatttaatttctaacaaaagtaaggcacttcgttggcaaaagtggcacgcaatgattggagttatcattgcaattccagtatttgtattagttttaactggattgccatggtctggttttatgggcagtaaaattgccggtatgatggacacaaacggtgaccttggtcaaggtgaattagcgattaatccacctaaatcagatttgaacgaattaccttgggctacacgtaaaaataaacagccagcttcatccgaaaaaggttcaagtggtcatcatggtaatgcagcaatgcctcaaaccaaattagattatcaaatatctattgataaggtcgttgtacaagcgcaaaaagctggtattaaaaagccgttttcaatcgtatatccaagtgataaaaatggtacctttattgtatctaatactagtaattcaggtgttactgggctagatgtatcaccttacaaggaacaaacactttatttcgaccaatatagcggtaaaaagctaggtacgattaaatatgatgactacggtattattgctaaatggtttacatggggcattccgcttcacgaaggtcatttattcggcattttaaataaaatcattaatttatttgtatgtatcactttattagtagccattggcatggggtttgtctcttggataaagcgtacaaaaaatactgcagtaaaagtaccacatcgcgtaaaaaaaccagcatctatatcactcataatatgtttaattgtattaggattattaatgccattatttggattatcacttatccttgtatttataattgaattaatattatatattaaagatcgtcgtgctaaacaataatgcacttaaagttttgaactgacgaaatttacaaaatgattctcgtctctctaattacttaaaacgggttctataataaatcgtactgatggaaagtttttactttttatctgtcagattttttgaatttgaagataaaaaagcatctaaaacgcataagaagataactctacttcttcaaaattacgttatagatgcttttttattaattcatatgcatgtcgtgaattttcatcattaaaccgtgtgggacgtcatcatgtttaacaatctcttgtttataaaatgtcttcccatcatctttagaaactaattttacaaagtctccttttttcggtttaaaatcatttgatggttctactttgatattatgtttgactaatccatctttttcactgacaactttttctgcatttgttttactattcatataaccaaaataagtcgttttttgactagaaaaaatcattaaacatacaacggcaataccaataacaaccaatgctatagataaacctagacccatttttttacccatttatagactcctccatttttcaaaaatacctattatcatgagaacttaattattactaattttagtcacgcattagaaacactttagttttcaatagttttacgttctgtctttttaccccagtattgataataagtacattctatatatccattaaataacttacgtcgcttcgttgctttacgatttactaaatattcaaattctttattacttgttaaaatgtatgtagataaaaatggatgttgtttcattagtttaccaatataacggtacatttcttcaacttcttcacgatcaccaatacgttcaccatatggaggatttccaattaacgccaccggttcttctgtatcaattgttaatgtattgacatcttttacactaaatttaataatatcagacaacccaacttcttcagcgttacgcttagcaatctctaccatttctggatcgatatcagaagcatatacttcgatttctttatcataatcagccatcttatccgcttcatcacggtaatcatcataaatatttgctggcatgatgttccattgctctgatacgaactcgcgattaaaaccaggtgcgatattttgagcaattaaacaagcttctatagctattgtacccgaaccgcaaaatggatcaattaaaggtgtatcacctttccagtttgcaagacggattaaacttgctgccaacgtttctttaattggtgcttcaccttgtgctaatctataaccacgtctgttcaaaccagaacctgatgtgtcgatagtcaataatacattatcttttaaaatagcaacttcaacagggtatttggcacctgattcatttaaccaacctttttcgttatatgcgcgacgtaatcgttcaacaatagctttcttagttatcgcctgacaatctggcacactatgtagtgttgatttaacgcttctaccttgaactgggaagttaccttctttatcaattatagattcccaagggagcgctttggtttgttcgaataattcgtcaaacgttgttgcgttaaaacgtccaacaacaattttgattcggtctgctgtgcgcaaccataaatttgcctttacaattgcacttgcgtctccttcaaaaaatatacgaccattttcaacatttgtttcatagcctaattcttgaatttccctagcaacaacagcttctaatcccatcggacaaactgcaagtaattgaaacatatatgattctccttttatacaggtattttattcttagcttgtgttttttatacatttccaacaaatttaatcgctgatacattaacgcatccgcttactattttaaaacaaggcagtgtcattatatcaagacaaggcgttaattttaagtgttcttttcatgaaaaaagctctccatcatctaggagagctaaactagtagtgatatttctataagccatgttctgttccatcgtactcatcacgtgcactagtcacactggtactcaggtgataaccatctgtctacaccacttcatttcgcgaagtgtgtctcgtttatacgttgaattccgttaaacaagtgctcctaccaaatttggattgctcactcgaggggtttaccgcgttccaccttttatatttctataaaagctacgtcactgtggcactttcaaattactctatccatatcgaaagacttaggatatttcattgccgtcaaattaatgccttgatttattgtttcatcaagcacgaacactacaatcatctcagactgtgtgagcatggactttcctctatataatatagcgattacccaaaatatcacttttaaaattataacatagtcattattagtaagacagttaaacttttgtatttagtaattatttaccaaatacagctttttctaagtttgaaatacgttttaaaatatctacattatttgaagatgtatttgttgttgtattattcgaagaaaaacttttattgtcctgaggtcttgatgttgctacacgtagtcttaattcttctaattcttttttaagtttatgattctcttctgataattttacaacttcattattcatatcggccattttttgataatcagcaataatgtcatctaaaaatgcatctacttcttctcttctatagccacgagccatcgttttttcaaaatctttttcataaatatcttttgctgataatttcaatgaaacatctgacattttttccacctcattagaaactttgatcttcagaccactgtaagtcattgatgaatgctgttaattcatcgaacgtcacaatatcacaagtatagtttgttttatccataaaatcaactaacatctgcttgaagaacttaggacttgcctcttgttcctcatcataaatgagcaatgtttgatccgaatgttcaagcataaattgatctgcttgtttaaattgaaaaggaccttgatacgacgtatgaaaaatactatcaacataatctgcatgcttaattatgttggcatacttactttgattatgttcattccacttttctgtatgtccttggaacggtgtaattacagcaaactttaacgaatcatatgttcgttgtaattcaataacaacttctgcagtccataattctatacccatttgcccttgtattaacacccattctaatccttcatccaacagttgttcaattttatgttttataaattgttttaaataatgtacttcaggtgcgtcatctttaaaaatgtttaattcgaatgatttgtaacctgttacataaactgttttaaccataagtaccctcttttgttacgccatctaatatattttgtaaatcatattggacacttttaagcttttctataaataactttcgacttgttcgcttaaaatgacattcgacagaaagttgttcaatgttagcaatcagtagctcaaatttccttgaattcatataaggtacttctataataaattcacgatgtaatttgatctcattgagcatgctatcaatatgttcagtatatggctttacagtttggtaaaaatcatgatcttgttgttgtgatttcacattttcaaaattttgttgcatgttgttaacttcataaattagtgattcgactacatcattcatgaggacgcctcctacattttttaatttatcacaatatactgtattcgtcatgttttaacactctatataatttgatttaactattttttcaaatgtgttatctgttaaatcaagtaaatctaaaaacttcctatataaatacaaaattttatcgtgtatgttgttatacgatgaaaatacttttaatctaataaaatcatttaaatcaaatacacctctgctgattaacaacacatacttgtacttgcctcaaaaataaaaattactgatcatgatttgacttttataacaaaattcaaaaatattgtaatgagtattcatttttataagcaaaacttttcaattaattaaaattgtgtgtaaaattccaacattaacggtaaatgtattataatattattgtgttaatgctgaaatcacgttaaaataagctttggtgtattgtgtctttcgcatttatactaatttaagtttggtgtttcactataatgttgtgtataataaacaacgtttactaccaaacttgtgtggtgaaatttatgaattatccaaatggtaaaccatatcgtaaaaatagtgctatagacggagggaaaaagaccgctgcctttagtaatattgagtatggtggacgtggtatgtcacttgaaaaagatatcgaacattcaaatacgttttatcttaaaagcgacattgcagttattcacaaaaagcctacgccagtacaaatagttaatgtcaactatcctaagcggagtaaagctgtgattaacgaagcttattttcgtacaccttcaacaactgattacaacggcgtttatcaaggttattatattgattttgaagcaaaggaaactaaaaacaagacgtcctttcctttaaataatattcatgaccatcaagtcgaacatatgaaaaatgcatatcaacaaaaaggtattgtgtttttaatgattcgttttaaaacgctagatgaagtttatcttttaccctattcaaaattcgaagtattttggaagagatataaagataatattaaaaagtctataacagttgatgaaatacgaaaaaatggttaccatattccttatcagtatcaaccaagattagactatctaaaagcagttgataagttgatattagatgaaagtgaggaccgcgtatgacggaaaacaaaggatcttctcagcctaagaaaaacggtaataatggtgggaaatccaactcaaaaaagaatagaaatgtgaagagaacgattattaagattattggcttcatgattattgcatttttcgttgttcttttactaggtatcttattgtttgcttattatgcttggaaagcacctgcttttaccgaagctaaattacaagatccgattcctgcaaagatatatgacaagaacggagaacttgttaaaacattagataatggccaaagacatgagcatgtaaatttaaaagacgtgccgaaatcaatgaaagacgcagtacttgcaactgaagacaatcgtttctacgaacatggcgcacttgattataaacgtttattcggtgcaattggtaagaacttgactggtggatttggttctgaaggtgcctcaacattaacacaacaagttgttaaagatgcatttttatcacaacataaatctattggacgtaaagctcaagaagcatacttatcatatcgtttagaacaagagtatagtaaagatgatatcttccaagtatatctaaacaaaatttactattctgatggcgtaacaggtattaaagctgctgctaagtattactttaataaagatttaaaagatttaaacttagcggaagaagcttatttagccggtttacctcaggttccaaacaactataatatttatgatcatccaaaagctgctgaagatcgtaaaaacactgttttatacttaatgcattatcataaacgcattacagataaacagtgggaagatgctaagaaaatcgatttaaaagcgaacttagtaaatcgtactcctgaagaacgtcaaaacattgatacaaatcaagattctgagtataattcatacgttaactttgtgaaatctgaattaatgaataataaagcattcaaagatgaaaatttaggtaatgtattacaaagtggtattaaaatttatacaaacatggataaagatgttcaaaaaacattacaaaatgatgttgataatggtagcttctacaagaataaagaccaacaagttggtgcaacgattcttgatagtaaaactggtggtttagttgctatatctggtggacgtgatttcaaagacgtcgttaacagaaaccaagcaacagatcctcaccctactggttcatctttaaaacctttcttagcgtatggacctgccattgaaaatatgaaatgggcaacaaaccatgcgattcaagatgaatcttcatatcaagttgacggttctacatttagaaactatgatacgaagagtcacggtactgtatctatttatgatgctttacgacaaagtttcaatatcccagctttaaaagcatggcaatcagttaagcaaaatgctggtaacgatgcacctaagaaattcgctgccaaacttggcttaaactacgaaggcgatattggtccatctgaagtacttggtggttctgcttcagaattctcaccaacacaattagcatcagcatttgctgcaatcgctaacggtggtacttataacaacgcgcattcaattcaaaaagtagttactcgtgacggtgaaacaatcgaatacgatcatactagccataaagcgatgagtgattacactgcatacatgttagctgagatgctaaaaggtacatttaaaccatatggttctgcatatggccatggtgtatctggagtaaatatgggtgctaagacaggtactggtacttacggtgctgaaacttattcacaatataatttacctgataatgcagcgaaagacgtgtggattaacggctttacacctcaatacactatgtcagtgtggatgggcttcagtaaagttaaacaatatggtgaaaactcatttgtgggacatagccaacaagaatatccacagttcttatatgaaaatgtgatgtcaaaaatttcatctagagatggcgaagactttaaacgtcctagctcagtaagtggtagtatcccatcaatcaatgtttctggtagtcaagataacaacactacaaatcgtagtacacacggtggtagtgacacatcagcaaacagcagtggtactgcacaattaaataacaatactagatctcaacaatctagaaacagcggtggattaacaggtatattcaactaatccactcaacataaaatcctcagttataccatatttatggtgtagctgaggatttttttaggttcttcatcttttatggtgggaaggtaaaacttcctgctttttttataagtattcatacgctaatgctatattagtagaaaccgtaaaatcagtcattcacatacattttgaaacatctaaatagtttttcatattcacatctttagctatgtaaaattattgaatttgaataagtggttgttcccatttttaaaattatgattatattttctcatagtcatcttagacgctgttttaaattgaaatgtttatcaattccctgtgtacgttaatcagtgaaatatcaagatgtttgcaacatattttcacaatcatagatataagaaatccacctacgattcgaaataggtatcttaaagcatatctcaagatatccattatgatgtagatggacagtttttatattaagacgttgtaatgacacgacacctaacataaatacaaatatgtgtgcatgaattagttttacatattttcaacattaagaaatgatcaatcttgtctatacctgcttattctttaaccttgtttgataactagcattcattttaatcaattcagttttaaaggtcttcatttgtcgatagcccataaaatgatatttacgttcaatcatataatcatatctttctttaaaattcattggcacaacaggatattgatttaaattatcaaaatcaatattgctagttatgtcattaacctgcttaaaataatcaataattttactatggtattcatccaagtagggctttgcttcactagaacctaatgccttatttttggcaaatacatcaatctcttgttctaaattatcaaatacctcttttgtaatatttgtcatgttatcacgcttctttcaaactagctttataacgtttttgtccttctctacaatcttctaatagtggacaaatatcgcatttaggttttcgggctaaacagtggtatcttccaaagaaaatgagttgatgatggctcctattccatctatctctaggtatgacagaacataaacggtcttctacctgtctcacattatctttccaacgattaatacctaagcgtttagaaacacgttctacatgcgtatcaacagctaatgaaggttcatcaaatgctacactcatgactacattagcagttttacgtcctacacctgctaaactttctaattccttatgtgtttgtggtatttctccattaaattgatcaatcaaagattgacaaagtttcttaatattcttagctttgttacgatacagaccgatagaacgaatatcattcataagttcttcatcactgactgccaaataatcttcaggcgttttgtattttttaaacagctcagttgttactctatttactagaacgtctgtacattgcgctgacaataatacagcaatagttaattcgaacggattatcatgttttaattcacattctgcatccggaaacatatttgctataacatcaatcatttctaatgcttttttcttacttaccatcaaggttctccccgtttaaccaatcaaatttaggtaccgttttaactgtgtgcgtcattttcggtttattaaatttttctcttatttttctagaatcgtcaattgttttgacattgtttttcttccaattaagtaaaatacgatccatatatttaaagctaagtttattcaaactattcgcctcgtctaatgccgcttgtataattgcactatcgtgtttatcaacatcaatccattgatttaacgtttctatttcatatggagataacggccttgcaaatgtatcctctaaaactctaaataattgtttaaatttttctttactattttgctctttcgtttccatactttgttgcttcaatatatgacttaatttttcgaaaaaaggatctagattcatatattcggtaaatctaccttcttcatctttttgaacttgtaattctagcaattcacgttgtatcaaattttgaataaccattgtaatatcacgtggttgcatagttgagcccttctgaagtaattcaattgaaggctgtttatttgatgtttcggaagcataaatcaatttaagcaaaatgactaaatcttgctcatctaaacctaagtcactgtaatggtctaataattctcttcgtatcactacaggtcttgcttttaattgatatttatccatgtccgtgcccccttttaaatttaaccattacttaatagtataaatcattttctttaattttcgactaaaatgcttaatatatttaactagtagcaaacaaattttaaataacagtattttttaaaactagattttaacaatgaactttatggataatcagatgaactatttattttccaaatatagttactaaacaaaagtttgttcatgattaatataagccgttatcaatcttcattttgcaagcataaatcgcccagctattaatataggctggacgattctttttattatcataatataaattttaagtaacgatcctaaaacttatggatataaacggtttaataatcttgggaatggcgcagtttcacgaacgtgttcaacaccagaaatccatgctactgtgcgctctaaacctaaaccaaatccacagtgtggcacactaccataacgacgtaagtctaagtagtaactatatgcttcttcgtctaatccatgttctttaacgcgttgttctaacaattctaagtcatccacacgttcagatccaccgataatttcaccgtatccttcaggtgcaattaagtctgcacataagacagtttcttcattctcaggatttggttgcatatagaaaggcttaattttagttggataattagtaataaacaccggtaaatcataatgattagcaatggcagtttcatgtggcgcaccaaaatcttcaccccattcaatatcatcaaagccttctgcttttaagaattcaattgcatcatcatatgaaattctagggaatggtgtcgcaactttttcaagttttgatgtatcacgctctaaaattttcaactctagtttacaattttctaaaactgattttactacatgtgttacatattgttcttgaatttctaaactttcagcatgatttgtgaaagccatttccccttcaatcatccagaactcgatcaagtgtctacgtgtttttgatttttcagctctgaaagttggaccaaatgaaaatacttttccgtgtgccattgctgcagcttctaagtataactgaccactttgagataaaaacgcatcttgatcaaagtatttagtatggaataattcacttgtaccttctggtgcacttgctgtcaaaattggtggatcaacctttgtaaatccatctttgttgaaaaattcatacgttgcacgaataacttcatttctaattttcattacagcatgttgttttttagaacgtaaccataaatgacggtgatccattaagaattctgtaccatgatttttaggtgtaatcggatagtcatgcgcttctgaaataacttcaattgatttcacttgcatttcgtatcctaagtcagaacgattatcttctgtaattgtgcctgtaacgtatagagatgattcttgagcaatttctttcgcaagtttgaatacctcttcatcaacttctgatttaactactacgccttgcataaagcctgttccatcacgtaattgtaaaaaggcgattttaccacttgaacgtttatttgttaaccaagcaccaattgtaacgtcttggtttaaatgatctttcgcttgtttaatcgttgttttcataaccattctcctatttattttttcgttatacaatactcattcattttaacaaaatccgctttcaagttctagaactagactaaaagataacgtgtaaatggtaatgatttacgcacagatttgaacattaatttatattaagacaatacaatcatcagtttcagacaaaatatataataaagcctcaatattattagtatgaaggtcgttttttgtgctaacattcaagtttaattataaaactcaaattttgacgaccaaacaaaaattcttgtaacagaacatagcacatgtcatgtcacaagaattttactttgtatttcactttttctttttttgaatttgtcttaataattttccaaactgttgaatgtcgccttttttctgacgataattttcaagtgtttgttcaaaaaagtttttataattactgtttatgagtcgatcatcaaatgaaactattatgccgcgatcattttcatttctaattaatcttccaagtccttgtctaaaacgtgtaactgcatcaggtaatacatattccttgaaagttgaagtgaattcagaatccataagccaatattttgcattatgcttgttcataaacggtaacttcgctatcatcacacatttaataccatttgcttgaaaatcaaaaccttcaaaaaatgttgacgtaccaagcagtatggccttatcaaaattattaaactgttgtactattttataattttggttctgctgttgtgttaatacaacataatcttcaaattctggcaattcatttagcatatcttgtaccatatgcatcattttataactcgtaaataagactaaacattttgatgacgttatagtcgtatattcaataatatagcttacaatcgatgctacatactcatctatatttttatattgataagatgctacatcactcggtataaatacacttgtattttttgcactttgtaacgacgtgttaacttcaaatgtattaaagtgaacatctttgttgaataactgtttaaaagcttcaaacgaatgattaaattttaaagtaccagatataaaaatgagtgatttaaatttttccaatacttgtttcgttaatacatcttttacagcgtaatctttcacatataaacgtattgttgatttttgagataaatttttaattgaaatgaaactagtatgtccagcttttaaactttgttcgatatttttaaatttatcttttaaatacaacaactgtttccgtaatgatttaactgttttatgactaatgccattgaatatttctagcgttttatttaacttatcgataatcgcatgtaaatccttcaaaatgtcttttgtttcaaaagtaaatacattatggaagcgatgaatatcatcatcataaacatcagaatcattgataatcgtaaatatcgttgagaacaattgctcatttaactcatgaatctcattcatactagccttcaagccaaaaatatcaattggtgcaatatctaatttttccaaaattcgctgcttttccagttgatcgattgcctttaacaatttttcattttcgtttttaccaatcaaaccaagctgatatttaatatcagcataactcaactcatttgtcacttgatttaaggcatagtctggtaagcgatgtgcttcatccactatacaatcatcaaacaattgatatattgaattttcaacatcagaatgaattaaatgtgcatgatttgtaataccaatttgaatgttctgtgcatttcgcttaataaaattataataatgaacatcgtgacgtgccggtacatatgtttcaattttctggtcaaaatacatcttttgaccaccttttaaatttaattcctgtatatctccggacggcgtctctgtaatccaaattaacaattgcattttcaagatattcacttcgtaattacttgtgtcatcttttaaaatttgactaataagtcccaatgaaatgtaatcacttttacttttaatcaatagtgcattaattttaaaatttaacgcttcattcattgctggaatatctttttctaacaattgactttgcagtaatttagtattggtagaaatcatgacatgcttcccagtttcaatattatacatcaaggccgcaagtaaatatgctaatgatttaccactgcctagtgatgcttcaatcattgctttttcactatgcatgagctgatctaatatagtttccgctaaatataattgttgcggtcgatatgttaagccaagttgatctacagctttgctatataaagacttcaagctgccattataatttgttgtcggctttttaaaatcaacttgcttacgatagataatctgttcgaacttttcgtacgatttatccaatggctttgcatcatattgcctaaccatctcaaagaaaatatcatacaaatcgtatttcaactgtttacttaaataatataattgcttcaaagtatctaacggtaacttttcaaatttttcaaaagctaatatcatcaatttagcagtagtagcggcatcttcgtcagctcgatgggcatttgctaaggtaataccatgtgcctctgctaattcacttaattgatagcttttatctgtaggaaaagctattttaaagatttctagtgtatctataacttttttgggacgatattgaatattacaatctttaaatgcctttttaataaaattcaaatcaaaatctacattatgagcgacaaaaatgcaatcttttatcttatcgtagatttcttgtgcaacttgattaaaatatggcgcttgttgtagcatattttcttcaatggatgttaacgcttgaatgaacggcggaatctctaaatttgttctaatcatagaatgatatgtatcaataatttggttattgcgcacaaacgttataccaatttgaatgatatcgtcaaaatctaattggttgcctgttgtttccaaatccacaacggcataggttgccatacccatagctatctctccttgctttagtgttaaaaatctatatctgcactaattaaacggtgtgattcacccgcttcatctctaacaattagatagccatcgtaatctaaatcaattgcttgtcctttaaactgtttatcattttctgtaaatagcaacgttctattccaaatattagaagctgcaatatattcttcacgaatttcagaaaaaggtaacgttaaaaattgattatatcttttttcaatttcttgaagtaatctctctaaaaattgatatctatctaatttatttttatcatgtaattgtatacttgttgctctatgtctaatactttcatcaaagttttctagttgttgcgtcaaattaatacctataccacatattattgcttctataccatcattattagcaaccatttcagttaagaaaccacacactttaccattatcaatatatatatcattcggccatttcactttgacttcatcttgactaaaatgttgaatcgcatctcttatccctaatgcaataaataaattaaatttagatatcattgagaatgcaacgttaggtcttaacacgacagacatccaaagtccttgcccttttgaagaactccaatgtctattaaatcgcccacgacctttcgtttgttcatcactcaagataaaaaatgaagattgatttccaacaagtgactttttcgcagcaagttgtgtagaatctattgaatcgtatacttcactaaaatcaaacaaagcagaactttttgtatattggtctattataccctgataccaaatatctgggagttgttgtaataaatgccctttatgatttactgaatcaattttacatccctctaactttaattggtcaatcaccttttttactgcagtgcgtgaaatattaagtgattccgcaatgctttgtccagatatataattcggtttatttttatagagtaattgaagtacatcttgactatattttgacatgattatccacccatttcaaaatttcagtttcttcgttgcttactttacctgttacaatcgctatctcaatttgtcttagcacatcttttaaccacggaccacttttggcatttaaatgtgccataagtacaccgccattaaccatcatgtcttttctattatgcataggtaaacgatgtaatgtttcatcaatcgtttgaaggttaacgattaatggttcatgtccttgaatatcatttgcctttaacacgtctgctgcaaccattacatttttaatgagattcgtatcataatcataaacaaacatttttaattgttcttttgtaataatacttggtaatgcattcataatttgaatatattgattgatatcttttacttgtcggttacttagctttaaaggcttcaatgagtaattaatatcaaatttaactgacactatagcaatcaacaattctaaatcaattggttcagttacattaatttgattcatatcaagttgttcgaaatatggcatataattaaatgctttcagcgattttaaatgattaaaactctcttcaacattaatacctcgcattaatttagttagttcaatcactatacgctcaattgataaaaatttaatatctgccatttgtgtacgcatcgcttcaaatgtttccattgcaatatcaaatgataattgtgactggaatcttaaacatcgaatcatacgtaaagcatcttcttggaatcgttcctcagctatacctacagttcttattattcgattattaatatcttgttgaccatcaaaataatcatacaatttgtatgctgtatccattgctatcgcattcatcgtgaaatctcttcgttgcaaatcttcgtataaatcccgaacaaatgtaacaccacttggtctacggtgatcgacataatcttcttcagcccggaatgttgtcacttcataattttcatcattaaaaactacatttatggtgccatgttctttacctacaggtatcgtatgactaaagatagattctatttcatccggcgttgcacttgttgtgatatctatatcatgaatatttcttcccatgacataatctcttacagagccacctacataatatgcttcaaaaccattgtcttgaatttgttctaatataggccttgcctgttcaaataatgatttatccatattattactcgcctttacttttgttatgctcatttagcattttttgataataatactcatattgatctgtaataagttctgatccaaaacgttcagcaatatctgctagcatgtttttctgaagtttgttgtataacgccttatcttcaagtaaacggatagcatagtcactcgctgaatcacaatcacccacatctacaacaaatccagtttcaccatgtttaataacctctttaattccaccggcatttgaaccaattggaacgacgcctgttttcatagcctcaagtaaagttagtccaaagctttctttttcacttaataataatactaagtcagataattgataaaattcacttacacaatcttgtttccctaaaaataaaacatcctcttctacgtttaactctttcgtcaattgacgcattggcactaattcaggaccatctccaagtaaaattaatttactaggtatcttttcacgtacttttgcaaatgtttctataatagtatctatgcgttttacttgtctaaaattcgatacatgtattaacactttttcatctggtgctataccaaattgtgattttaatgctgtgttatgtttagttggaaactcattttcacgtacaaaattataaatcggtataatttctttgttagtttcgataatttcatgtgtttcttgcgctaaagatttactcacacttgtcacaatatcacttttttcaatgccaaatttaattgcaccttggagtgaatgatcatagcccaaaacagtaatatcagtaccgtgtagcgttgtcataatttttatatctttacctgacatctcacgagctaaaattccacaaattgcatgaggtacagcatagtgcatatgcaacaaatcaagatcatattctttaataacttcagcgattttagtacttaacgtaatatcatacggtggatattgaaatactgcatattgattcacttcaacttgatgaaaaatcatattcggcaatggttttcttattctaaacgggatatttgaagtgataaaatgtacttcgtgacctcgctctgctaatttaattcctaattctgtggcaataattccagaaccacccatggacgggtaacatgttatacctatcttcattcgcttgcccatcctttctttctatttctctttctattattctcgatgcgtagataattgtttaaatttaagtttatagtaatgttgagtttataatttcaaatatctaaaaaacaggtgttgtatatataatcatttatctagttctacttactttaaaaataatataatttcatgcgatgcaattcattggtctatgtttttaatcttaatcaaatccaaataaagcatatatttttaaattcactttctttcgaatcgatttttatctcttgtattaaacttttccattgtttcattaaagctctctgtcatatctattcccattgaattcgctaaacataacaacacaaataaattatcacctaattctgctttaatcgtatttgcttcctctgaatctttcttctttttttcaccataggtatgatttatttcacgtgcaagttcgcccacttcttcagtcaatctagctaagttagctaatggtgaaaaatatcctgttttaaattgtccaatatattcatcaacttcacgttgcatttctaccattgatttcatttctacgttctccttatattgcatttctaatatagtatatatcaatttgaagtctcatgcatgtttagtgcaatctactgactctagctaaactagatgacaagttgtttattttagaagtttaataattcagtttatataaatgtaatgcattcctaactaaattaaatcaattgaaattgggattataactttatgattcgtaccactacaataaaataatataatgaataatctaccattagaaaaataagcacaaaaaaactagcaatcacacaaaatgtgattagctagttaataagtgtctaatttaagttaattgttaatctataagattaatcacttgaacgcgcaatcaaaataatacgtacaagctctgctacagcgacagcagttgctgcaacataagtcattgctgctgcagataatactttacgcgcatgcttgtattctttttcatttacaatgttcaatgccgtaatttgtttcatcgctcttgaactcgcatcaaactcaactggtaacgtaacaattgagaataataccgctaatgacattaaaccagcaccaatccataaagcagttgaaccaaatgcactacctatcgctgttaagataatacctaacatgatgatcatataacttaatgaactccctaggtttgcaacaggtactaatgctgctctgaatcttaagaaccaatatccttggtgatcttgaatggcatgaccaacttcgtgggctgcaattgcagttccagcaactgatggtctgtcatagtttgcaggagatagtgaaacaactttctttttaggatcgtaatgatctgttaagaatccttcacctttaacaacttcgacatcataaataccgtttgcatgtaaaatttctaatgcaacttcacgacccgttttaccactagttgatctaacttgtgaatatttctcatagttagatttaactttgtgttgtgcccataaaggaagcaccattaatattacgaaataaattatcatagtaaaaattgaagacaataaactcactctcctttataaatattttactgtcatttgccgtttttatcaaatcatttacactttaataatttgtttaattcaatataaagcaaaagtccaaaaacacttagacaacatgataatacaccaatttgccacacatgtgtagttataaaatcataatatggaaattgaaggtgaaaatagtcaatataatcattcaaaaacacccaaatcatcgctacactgattccaatcatagaacgtttaaacctaggatagaagtaaattgcctgaacagccattatactgtgggaaaacattaataccaaaccatttactgtaatatcaccttgttcaataataaataatatattcattataactgcccaaatcccatatttgaataatgttacaaatgccagtgcttcgataatactattttgtttttgaattaatatcaatgagatagaaataactaagtataatattgcagttgggctatctggaacaaaaatcttaaaatgccacggcgtatgacttaattgttcaccataccatatataaccataaatcatccctaatatattacaaatgagtagcatcattaaccaagaacgttgataaagtgtatattgccaaaatgtattaatcgtcatctgctaagtcctcaaattgattatgtttatttactagcttgagtgtatttaaaatttgcgttagttgataaaaacgttgcttttcattcatctgtaaacttaaatcaatattgtgtaacaagtaatctattaataacgcatgtttatgccgatctatagccatactatttaagtcatgaagataagtttgataactgggcgattccgttagttgagcaactattaaatcatctagcctttgctcacgctttgacacgtttgcgaagtgaatttgaatatcaaaagcacagttatgattagcgatataatcaaatatttcatttgtattcattaactttatattacgcttagtaaattgaattgcagaagcgtgacttcccacttctgcaatttctaatgtttcatgatgattaatttttgtatctacaaaatgaatgtttgccaatttcgcctcattcacttttatatagttaagcacccaaactgcaatacgcgacttaaatcgatattgaaaaagtaaatattcaataaaactttctttaatttgattgagtgtctctgacatcaaataccccattttaagattgcaatcttgataattcgtcatgccaattttcgttacttggctctagttccaacaattgatttaaaatagtaattgcttgttccttttgaccaatttcaattaaatagaaataataatcactcataaaatcaatatttgttttcatcgttggatatgctaattcaaagaaatgttgagcttctttatctcgctcttcttgaccataggcgaacgctaaatgccacatgaatgtaggatccaaatcttcttcatctacatatgttaataattcaatgattgcttcataatcttcttcattacgatataaatcgcttaaaatcaataaaggttcttggtaagcattatcaacctctaatgcttgttttaacaataatacaccttcattagcatcgccgtgttctatttccaaacatccagttgtatacattaactctttataaaattgacttagtcgtaatccttctttacccgtctcaatggcatctggataatttttttcattttcatataatgattgtaaatacaagtagccttgaatataatcaggatctttagaaagtaatgtagtcattattttaattgcttcttgagtgatgtcatttttatcgtaagaaatggcttttttgagataatcttctgaagtcatttcatcttcattaatttcatcgtataagcgaatcgcatcactatagttaccactttgtaaactacaatctgccatacgagagaataagtttacaccattaacttgatattcaccagtttctaaaacggtttcgtattcagaggtagcacgtaaatattgaccatcataatataacatttcagccaatgcaaaatggattattggatcatttggctctagttcaagtgcttcttgtaatttatcaatagcaacttccatcatattaatttgttgatataaatctgcttctaacatcaacttttcaggtgatggttcaacataacttaaatattctaacgcttcgtcagtttgattttcagacattaaaccttcaataaaataaatcagcaattcactttcgtctggatatttgtgatataacacgcggaatacttccaaaccttgtggcattaatccaaaattgtaaagtgtctctcctagaataaataatgcgtcatcgttgtcagtagttattgcttcattaacacgagagtctaaattttctagtttttgtagattgatatcgtctattaatttatagatatcttccattttatattatccctcattttctaaaagctttagttttggtaaaaatcctggaaatgatacatttacagcatcaaattgtttgattttgacaggctcgcttgaaagtagagaagcaactgcaagcatcattcctattcgatgatcagttaaactatcaactgttgcatttgttttaaattctgacggatgaataatcaatccatcattagttggttgtaattcaaaccctaacaagtttaacatatcagccgttgtatcaattctatttgtttcttttacttttaattcctcggcatctttaattgtactcgtgccaactgcttgtgtacaaagtaatgctattacaggcagttcatcaattgcttttggaactaattctccttcgattgttattggttgaagcattggtgtgtattgaatacgaatagaagcagtaggttcagcaccagttgtttgattgaaaagttggatattaccgcccattttttcaacaatatcaataatacctgaacgtgttggattgattccaacattatgaattgttacatcactttctggtgtgataagtgctgcaacaataaagaacgctgcagatgaaatatcgccaggaacatgaaaatctgcaggtttaatatgttgaatggcatcaggggttgtagttattgataacctttctgcttcaattggaatattaaaatgtctgaacatcgtctcagtatgatttcgacttacatctaattcctttattaccgttgtatcatttgaaaacaaacttgcaaataaaatggcactttttacttgtgcacttgcaacttccatttgataatttataccttttatgacagatggcttaataattaatggtgtataattatcttcaataccttcaatattcgcatccataagtttcaatggtctcaagacacgatccattggccttttaccaattgaaacatcgccagacaaaacactttcaatacctaaaccacttaacaaaccagctaacaatcgagtcgttgtgccagagtttccagtatataaaacttgatgaggtgttttaaaagctttatatccaggtgaattcacaaccaatttatcttcatcttctttaatatctacgcctaataatcggaatatatccattgtacgacgacaatcttcaccaagtaatggtttataaatattggaagttccttcagctaaagatgctaacatgattgctcgatgtgtcatcgacttatctccaggcacttctatttcacctttaagtggccctgaaatatcgataatttgttcacttaccatttacttcacctacttaaaatatgtttttagttgttcacacgcatgttgcagtgttgtttgatcaatgtgttgcactacaatatcgccaaaatgtttaatcaataccatttgaactccttgtttgtcgttctttttatcacttagcatgtattgatatatcgtttcgaaatctatgtcggttattgtttctaaaggataacctaatttcgttaaataattaatataatgttggatatcgtgattagaattgaacaatatattcgcaacaataaattgatatattatgcctatcattacggcatgaccgtgtgcaattttgtggttatactccacggcatgaccaaatgtatgacctaaatttaaaaatttacgtacaccttgttctttttcatctgcaacaacaatatccagcttcgtttcaatacctttagcaatatatttatccataccatttaatgactgtaatatctctctatctttaaagtgctgttcgatttcttgcgtcgttgattcaccattcaataacgcatgcttataaacttctgcatagccacttaatatttgctcaaatggtaacgtctttaaaaagtctaaatcataaatcacagcagttggacgataaaatgcaccgataaggtttttaccttgttttgagttaatacccactttaccgccaacactagaatcatgcgccaaaatcgttgtaggaacttgtataaaatggacacctcttaatagtgttgctgctacaaatcctgcaaaatctcctgtcgcaccaccaccaacagctataatcgctgtattacgcgttacatgatgtgacaaaatgtattctaatgtttcttgatattgctcaaatgttttcgtcttttcaccagctggaataatgactttatgcacattttcatatgataaaatatcatcaaatttatcagcaaaatattgatttacatgctcgtcaattaatataaaactttgatcaaactgatcaatatacgtgctaatatggtcaattgcaccatgttcaataaatattggataattgtttgaaggataggttgtttgtaatttcatgatcacacctcaattgttctcgttgttaaaactcaacatttaattgtctgcggtcagcaatttgttgttgaagttgttcaatatggtttgattgaaactcttcaagtaatgctttcgctatttcaaatgcaacaacgtgttcacacactatacttgctgcaggtacagcacaactatcagaacgttcaattgttgccttaaagtcttctttagtatttatatcaactgaatttaatggtttatataacgtaggaataggtttcattacaccatttacaataattggcataccatttgacataccaccctctaaaccacctaaatgattagatccacgataataaccaatttcactattatatagaatttcatcttgaatctcactacctggcttttcagctgctttaaatccttctccaaagcttacacctttaaaagcatttatgctgacaacaccttgtgcaatcttaccatctaacttacgatcataatgcacataactaccaacaccaacaggcatattttcaactacaacttgaacgacaccgccaattgaatctccttcatttttagcttcgtcaattttatctcgcattgcttgtgcgatactgtcatcaattacacgaacatcattacgatcaagatttgctttaaatgtttctgaatcataaaaatctttatctttaatgccacctatttcaacaacacgactgtatatatcgatatctaactgttgtaataacactttacataaggcaccgactgcaactcgagctgctgtttctctagcagatgatcgctctagcacatttcgtaaatcacgatgattatatttcatacctccaaccaaatctgcatgaccaggtcttggttttgtaatagtacgtttcatattttcacgttcttcttcacttattggagctgctcccataatttttctccaatgcgtaaagtcatcattggttacaaccatagtaattggactacctaatgtataaccatttctaacgcctgatactatttctactgtatctttctcaatttgcatgcgtcggccacgaccataacccccttgacgcttgaacatttctttattaatatcttcaactttaatttctaaatttgctggtataccttcgacaataactgttaattgaggtccatgtgattctcctgaagttagatatctcatacacactcgctcctttcatacttccgcaataacattataatatgttgttaatcttatcacattcattgtggattcataaatgtttgttttcaagcttaattaagaaaatggatgacatctcattttaaatgtcagaattatcttaatattaaacgaactaaaattaattataatatattcgtctgtagaaaagtatcatgaatttctaaacagttgcatcatataatcattaattaaaaatgattagccgttttaatataatcgtatcgcaactttagcaaataatatactgactacatttcttaatacaaaagaacgaactgttaattattaataaagttaatcagtccgtttaaaaaaattatgatattaaaatatacatatgttaagcgcttttgttatactttgacttcaaaaatataatcaattcttttactaatacataaaaaatataaatgagagtcagtataaaaataatttttgttataggattaagtggtttatctaaaaatatagcaccatatagtaattccattaattttaagaacattaaaatccccaaaataatcgaaataatattcttcattttaacaaccccttctctctgtttagtttcatttgataaagaatattcctctctttttaatacgtgttaccaaaaaactataaaatttttcaagtaatttactacaacataaaaaacgggccttgttatgtataatcataatgactaaccacataacaaaaccctttctacctttataaataaatcgtaaaggtttacagtttatattttattcatataaccatgcatcacgtggtgaagcatagctagtaatttcattttcattaaaccatagattaatttcacgttcagcagactctaatgaatctgaaccgtgaatgatatttctaccaacagttaaacctaaatcacctctaattgatcctggtgaagcttctgaaggattggtgctgccaataatatgtctagatacattaactgcatcttcaccttcaactaccattgcgaacactggtgctgatgtaataaatgaaattaaatcattataaaacggtttgccttggtgttcaccataatgtgtttcagcaagttccattggtacttgcattaatttaccaccgacaagttttagtccttttctttcaattcttgaaattacttcaccaattagatttctttgtactgcgtctggtttaatcattaaaaatgtacgttccactttatgtatccccctgtgtttaataggtttatgtatattactattatatattaacaggttggtaaagcgctttcaatacttttcataaatactatgtgtttcttgaccccatttttttcgtcaaacttaaaagtagtgatttcggatgtccatctggtaactcagaaatcaaattcaaagctttacttaaatacttcgaacttactgccttagcctcatcgatgctgtcagattttctaatgatttggatacattcttcaaattctttgcgttcactatcacgacgtaactgttcgattttcaatttgaagtctggatttttacgcatttctaataaaatcggtaacgtaatatgaccattaagcaaatcacttccgaccggcttacctaatttcttttcggtacttgtgaagtctaatacatcatcaatgatttggaagctcatacctatataatgaccaatcattttcaattttcgtacagtctctttatcagattgagaagtaattgcaccaacttcagttgatatttgaattaacagtgctgttttgcgattgatacgtcgtaaataattaataattgtctgttgactgttaaattggtcttgaaattggaaaagttcccctctacaaacatcaacgatagattcagatatcaattgatgtacacgattatctttaacggccattaagtgttcaagtcctaatgccaataaaaaattcccagttaaaatagcagttgtctgatcccatttctttgatatggttaacttgcctcgacgcttgtcgcttttatcaataacgtcatcatgaacaagtgttgccatatgaattaactctaatgcgactgcaacttgatacgtttgttcagacgtttgttcatctttgccaaattggctactcagaataacaaatgctgggcgtactcttttaccaccagaagacaataagtgtaatgatgcctgttctaatacagaatctttactttttattgccttttcaagtcgttgttccactttcttaatttcattgttcatgtttaactttgccacgttaatcacctttggtattatctttttctttatagccaaggtgcattgcagcaacgccccctgtaaaactacgtactcttacatttatgaaacctgcttcttcaaacatgcgcttcaactcttcttttccaggaaaattaaacgtagattgctgtaaccattcatattcttcttttgattttgcaaataattttccaaaaataggcataacaaatttaaagtatagtgcatacatttgtttaaagactggcaaagttggttggctcgtttcaagacataccaccataccacctggtttaagtactctattcatttcttttaacgcgactaaatagtctggcacatttcttaatccaaacccaattgttacataatcaaaagaattgtcttcaaacggcaattccattgcatcaccatgaacaagtttaacattttccattgaagcagttttttcttttcctacttctaacatattctcactaaagtcaataccagtaacttcacctgttggtcctacagctttgcttaatgcgattgtccaatcaccagtaccacaacaaacatctaatgctttcgtcccttttctaacacccatgtctttcatgacgcgttttctccatactttatgctgctcaaaactaataatattatttaatctatcatatttttttgaaatattttgaaaaacgcgatgtacttgctctttatttgctttattgtcagccatgcttaattacctctactttttaaataacttttttggatatcgtgtaagtaatgctttacttcactttgattatatttcttgaagtatgatggatagtaatcagacatatcttcaaataaataattatatatttccgactcatcaatattgataccgaaatgagataacgtaatatatgggaaaagtgtttcaatttttactattgcttgagaaatttcataatcatttaaagcttgatgatgtaatgaagatttcaattcattaatttcaacaattgctttactaatttcattttgaaatgataaatcattgatttctgctagtagcgtataaaaatgtgcactaattaaatctccaatcaaaatggaatgtttagacaaatgattatatgtaatgtcatcaaggtgtctcattgatgtgtcaattgtgaggcatgctactttggcaacatctggaatatcatatgaatcaagtaacttacctaaccgatgattaatattaatggattcatattctgatacaccctttaatctttcttctatttgtctttccaatttgctaacagttgtttccatgtctacacctcacgatattatcactattcatattaacattatatgtaagaaattaaaatcttttgaagcattaagattacttatcatttttaaatttcaatttaaactaacagtaatttatgtagcttttgtaattctcataataacctttacttcatttacattattcatctttttaaataacgtaaaatactatagtagacatggttaccttttaagtaaattcaacgctaacaattaatctcattattcatatgtatattttgtagttgctatttttatcaaaactattatgtcatgtaatattttgaacgcttaaacaatgaatgttccaaagattaaaaacttagaagaacattacaaattatgtacaggttgtaagtattaaaagcaaaataaaaagcccttattcagggctttttaagtaaaattattttacagcatcttttaatgctttaccagctttgaatgctggaactttacttgctgggatatcaatttctttaccagtttgagggttacgacctttacgtgcagcacgttcacgtacctcaaagttaccgaaaccaattaattgtactttttcacctttagcaagtgagttttggattgattcgaatacagcatctactgctgaaccagcttcttttttagttaaatcagcttgctctgcaactgcattgattaaatctgttttgttcattagacattcacctcctgaggtttgataatgatatgtttatatcattatggtaaaactttaacacaagcattacataaatcgcaatcatttatgtggcaaaaacgttgaatttaagccatttctattcattttacgtaattattagccgtatatgtgtaataatacacattttattcagattttttatcgcgctccattaaatcttttacgcattcttttactgagatattttcaaataatactctatataatgcatttgtaattggcatatccacatttttttctttagctaaatgataaactgatttagttgtataaataccttcaacaaccatattcatttcagataatgcttgatccattgattcaccttgtccaagtttatatcctaatgtgaaatttcgagaatgtgttgatatgcaagtaacgattaagtcaccgataccacctaaacctagaaatgtcataggatcggcacctaacttttcacctaatctactaatttccgctaaaccacgagtcattaacgcagcttttgcattatcaccgtagccaattccagctacgataccacttgctactgcgatgatatttttcaatgcaccaccaagttcaacaccaatcaagtcatcattcgtgtacacacgcaaataatcattcataaataaatcttgcgttaatttacttacacttttatcttttgatgatgcagcaactgtagttggttgcttgactacaacttcttccgcatgacttggccctgacaacacgccaatacctgcattatattcgggtgaaatagaatcttcaatcatttctgacacacgtttaaacgtcccattttcaatacctttagcaacatgtataaaagtctttttagaggtcagcttatcattaatttgagtagcaacttctcgcattgctttagtaggtaaagccattaagtaaatatctgcaaattgaattgctttggtcatatctgaagtagcgatgatgttaacatctaatttcgcgtattttaaatactttttatttgtatgacatgtatttaattcatcaacagcatcttgatttttaccccacatcaaaacatcatgtccattttctgcaagaacattggcaagggctgtcccaaaacttcccataccaaaaacggtaattttagtcattgttatcccccaatcgttaatttctctttcgagctataatatgaattggtgtaccttcaaaaccaaaagcggcacggatttgattctctaaatagcgtttataagaaaaatgcattaattctacatcattaacaaatacaacaaatgtcggtggttctatagcaacttgtgttgcataaaagacattcaaacgtctacctttgtctgttggtgtagggttcatggaaattgcatcagtaacaacttcatttaaagttgaactttgaacacgttttttatggttttcacttgcttcattaatgtaagggaataatgtacgtaatcttgtgcgttctttagcagacacaaaagcaatttgtgcataatctaaaaattggaattctttacgtacttcatcttcaaatttcttcatcgttttactatctttttccacagtatcccatttatttacgacaatcacgactgctttaccttgttcatgtgcatatcctgcaacacgtttatcttgttcaatgatgccttgttctgcatcaatgaccactaaaacaacatttgaacgttcaatcgcttttaaagctcttagtactgaatatttctcagttgattcatatacttttccttttttacgcataccagcagtatcgattaaaacataatcttgtccatcataactatactctgtatcaatagcgtctctcgttgtccctgcaacattagaaacgataacgcgatcttcacctaaaatagcatttactaaacttgatttacctacgtttggtcgtccaataatggatagtcgaattgtatcttcatcataaggatcttcttcctcttcaccaaaatgagaaacaactgcatctaacaagtcaccaagacctaaaccatgtgaccctgatatcggatacggttcaccaaatcctaatgaatagaaatcatacacgtctgtacgcatttccatattatctactttgttaaccgctaatacgaccggttttttagatttgtataaaatttgagcgaccatttcatcgctttgtgtcaatccttcacgcacgttaaccataaaaataataacatccgcttcatctatggcgatttctgcctgcgctctaatttgtgtttggaatggtgcatcaccaatttcaataccacctgtatcaataatattgaaatcatgtgttaaccattcacctgaagaataaatacgatctcgtgttacacctggcgtgtcttccacaatcgaaacacgttctccaactattctattaaaaattgtagatttacctacattaggcctacctacaatagctactataggtttagtcataagctaacttcctctctttcttatatctttttaataatatcacatgagactgtgtattcaaaatgagtttattactgtaatgataaaaatcagcacttaaaactttatctttttaaacacttagttaaatttgtccacgttatcattccgagtatattttgttacataaaaatactccacatgcaatcataaacatgtggagttgactattaaatattaaattatagtttaagatttttaagtttatcaccaatcatatcgccaattgttggattatcttcttcttcgttttctaagtacgccttagtcgtagaaggatcactttcaacaacatcttcgtttggtaatgttgctttaatagatagtgatactctttcattctcttcatcaatacctaatattttaacatttacttgttgaccaggttctaacacttcacctggcgtaccaatgtgtttgtgtgcaatttcagaaatatgtacaagtccttgtacacctggtgcaatttcaacaaatgcaccaaagtttgccaatcttactacgacaccttcaatgacatcattttcgtggaattgacctttaatattttcgaaaggtgttggtaacgtatctttgattgataatgaaatacgttctgtatctctatcaatagatttaattttaactttaacatcttgaccaattgaaactacttcttctggtgtttgaacatgttcgtgagaaagttcagatacatgcactaaaccatcaacaccaccaatgtctataaatgcaccaaattgagttaaacgcgctactttaccatgaataacatcgccttcatttaaagattgtaataattgatcttttttagcatcgttttcttcttgttcaactgctttacggcttaaaatgactctattattttcaggatccaattcttcaactttaatacgaattgtttgtccatcaaacacagagaaatcctcaatgaagtctgttgaaattagtgaagccggaacaaaacctctttgtcctacatcaacaaccaaaccacctttaactacttctgttactttcgcttcgatgatttcattattatctaatttttcttgtaaataactataagacttctcagtttcaagttgtcttctagataagatgtaagctccagtttcattttcttcatcaaactcaactttagtgacatatgcttcaacttcgtcgccctcttttacaacttcacttgggctatcaatatgatgcgtagatagttgactaataggaataatcccattaaatttaccaccgttgatatgaacaacaacttgcttgtcttcaacttgttgtacctcgccagtgactttgtcaccttctttaatatcgttaatcattgattcattgaattcttcagtcatcttgtttgcctccttatacactacatatttataacatcttataaactgacagaattgtcaagaaattctacctttattacatttagtaaattagttgtatccataaatatgtcacttaatctcattctgtaaattagttggacatatatttattacaaccatatattcaaacaagtaataaagtccgctatgtttatacatattttttgtataaaaattagcatagcttactattttgttttataagtctgtcatttcattgttctctacaagatatattatagtaaaattttatacttttataaaacaaaaagccacgcaaataagcaacttttacatttgaatagtaagaagaccgtatatagtgcatctttctcgaattattacataggacattttttgtgactaaatcaacttctcttgcaatatttagatttgtaacactcattttcttaccatttgtaaaatgctttatgaatgtaatgaattatttttggaattctaataattcacctttattatttctttttactttttgaaaaacttacacaattcactgacgcatgaacttttaccaaaaataaaaaggcaactttcattcatcattgaataaaaatcaccttttaatttgagtaaatcattatcagcacattcattttgtatatgcgttaagcgttgcacattacaaatagatagttatgacttattagattatttaatttgactcaccatcgctaaaatttcgtcagtaacttcttcaatcgacttgcctgtcgtatctaatgtcactgcatcatctgcttttcttaatggtgatatttcacggttcatgtcatattgatcacgagcttcaatatcacgttttaaatcttcaaaatttgattcgatacctcttaattgattatctttatatcttctttctgctcgctcttcaactgatgcaatcatatatacttttaaatctgcatctggtagcactacagttccgatatcgcgaccatccattacgatacctttttctgcagctaactctttttgttttttaacggcgaatgaacgtactggctctttagatgcaacgtatgaaacatgttgcgtcacatcattatttcttaaaaagtctgttacatcttcgttatctaaaatgacacattgacctttatctgctttataagttaaatctaatgttgtttggtcaactagttttgcaaagtcctcagttttgtttaattttaaatatttgtatgttaatgcacgatacattgctcctgtatcgacataaatcattgatagttcgctggctacacgtttcgcaattgtactttttccggcagcagctggaccatctaatgcaatattaatggctttcatgcgtcatttcccttccttgtcgttttatgaataatattttatcataattaggtaaattaaatataggaggaaatatatgaaacatctacttgttattcatactggtggcaccattagtatgtcacaagaccaatctaataaagtagtaacaaatgatatcaaccctatttcaatgcatcaagatgtcataaatcaatatgcacaaatagatgaattaaatccttttaatgtaccatcacctcatatgacaatccaacatgttaaacaattaaaggatattattttagaagcagtaacaaataaatattatgatggtttcgttatcacgcatggtaccgatacgttagaagaaactgcctttttacttgatttaatattaggtatcgagcaacctgttgttattactggcgcaatgcgctcgtctaatgaaattggttctgacggattatataattatatttccgctattcgcgttgcctctgatgaaaaggcccgtcataaaggcgtgatggttgtatttaatgatgaaattcatacggcgcgtaatgttaccaaaacacatacgtctaatacaaacacatttcaaagtccaaatcatggtccgctaggtgtattgacaaaggatcgtgtgcaattccatcatatgccatatcgccaacaagcattggaaaatgtcaatgacaaactaaatgtaccattagtaaaagcatatatgggtatgccaggtgacatttttagtttttatagtcgtgaaggtatcgatggtatggttattgaagcgttaggacaaggcaacatacctccaagcgcattagaaggcattcaacaattagtatctttaaatatacctattgtgctagtttcacgttcctttaatggtattgtgagtccaacttacgcatacgatggtggtggttaccaactcgcacaacaaggttttattttttctaacggttcgaatggtccaaaagcaagattaaaattattagttgcgttaagcaacaatttagataaagctgaaatcaaatcatattttgaattataatgaatacgtaacataaaaaggtctatgtacaataattagtcatcaacctcatttgacatatcatgaatgtcagtcgttgtaaaactaagttatttagtacatagacctttatttttatgattctaacggcgtttgtttcttagctagcatgttttgagcaataatgccaccgtggaatttaccattttcaataaaaatggtattcgcatcgttccctgcagcaattacacctgcaatatagcaattttcgatatttgtttcgtatgtttctttattatacataggcgctgttccaaattcatttgtattaatttgaatgcctacagattttaaaaattcataatcgggatgataaccaatcatcgcaaatacataatcattgtgtattgttttactttcaccatttacttcataagtcacagtatcttcagttatttgggtaacattagcattaaattccatgtcaattttttcatgatttactaatgctgtgaaatttggaagtatccacggtttaattgaaggcgaataatctccaccacgatatagaaccgtcacgttagcaccagctttttccaactccaaagcagcatcgatagccgaattcttaccaccaataataacaacatcttgatcaaaatacggatgtgcctctttaaaataatggaacactttaggtaaatccgctccttcaacttctaatgtattatgctgaccataatagcctgtcgcgattgttaaaaatcgacattcataaacatctttcgtcgtagtaatagtaaatttattattcatttttttaacagttaatacttcttcaaatgcatttacttttaattgatgatgttttacaacttctcggtaataaactagcgcttgattacgtcttggtttactttcttcaacgataaacggtacgtccccaatacttaatttatcacttgatgagaaaaatgtttggtgagtaggataattatagattgattcaacgacattccccttttcaataattaaggtatcaataccttttcttttttgttcaatagccgcacttaatccgcatggccctccaccaattatgatactttcaactttttgcattgtttcggcctcctttaatcccaaactattataacagttcagtgattgatgcgctaagtctgtgcttgaagatttatgatatatttttgacaatttgtttaatgtgcatagagaattgttagctacggagttgaataacactacaatttaatatgttgatttattttttattctccctcgttaaatttgttgattgtggtgttttatctttttgatgactatttaaaaagtttaattgatatgccaatattcgagacaagaccttgttaaataacaaactttgaaaaatgaaaaaaccgctacatacttataagcgcaatttaagttctccaaaatatttagagatacttataatatgcacgtttgtatatagcagttcagttacaatttatatagttatattatggaataacgatttgttgaccgtttctaatattgttaccacttaaaccattggcacgtctaattttttcaacattttccggtgaacctgaaccgtagtattgaattgcgatacggtataagttttcttgaccattcactgtatgtctttggccaccaccttgacgttgttgttgctgttgttgattttgattagcttgttgttgattttgattattttgtgcttgattgttcgcttgattagcgttgttttgatcattatcagattcatctttagtcgctttgtcttgatcctcttttgatttatcactgtctgtagattttgatttatctttagaagcgtctttagatgtgtctttgtctttactttcatcagcattatttttatttgtattcgcgattttattttcttttgtaccattattatgattgtttaatgccatgcctccaaatatcgctaatgcaccgataattagtacagctgcaattaatggtaacaatactttggccatgccaccttttttacgttctttatctctgtcatgattgtcatgttcatcatggttttggcttgcattattagaggcatgtggttttgaagcggcagaagcacttttacttgctgcgcctccagccaaacctgctgttccagcaccgatcgctgcaccttttttgccattatgatgatctttagacttatcttgagacgctttatcctcagtcgagttattcgacttgtcagaattacttttgttttgagcgtcatttgaatgtttcttagctttagaaacacccattgcaccagctgcacctgcaacacccgctgttccagcaccaattgctgcgccttttttaccactatgatgatctttagattcatctttgtcttgcttaacagttacatcatcatgtttatcttttgatgtatttgcttggttagcacctgttgcaaaatatggtttaggttgctgagattgttcagctttactcttatcagaaactgttgaatgctcagtgttattttctgcatctttaatagtctcgtgtttatcattgtcttcgattggttctggatgtgatttatccattgcaaaagcattcttattataatattcctcttcatgttgaggtgtactgtcttgatggctaggttcttgactttcagtactgtgtgatgattcgacttgacgatcatctattgtgccagcctcattttgaacattgtcttcagatgtttgtgattcattgtgaacttgtttattatgattcgttgctaaatcacggcgtctttttcttctttgggcatttcttggcggaaactgttgctccgtattctctattgtatcctgatgttctaattctgattggtctttttcaacatcttccgtatggtcttgatgtgaatttgtgtctatcgattgacgatttttttcaaagtcatctttaaaattattagacatagccatcttcctttctattctattacaatgattttacataaaatatacccacatgacatatgtttatgtatatttttcaaaattatttcaatcatttttcaattgtgtatacactaattatagcttgtcaattttcttttagtaaagtaatactatctgagaaataaattttgcaacttttcatcaaatccaatacttctaattaccttcttcttatttaaaattacgatatcagttatattagaatcattgtcacaacatcgatcttgtgccggtggatattcaccgaaaaattctaataaatacttccgtctacattgatccaatttgcaatagccaatcatgcgaaagaatcctaattgctttcgtttaaatgattgcttaaatatctgtttcaaggcgccgatactatagaatgaatgcaacgttgtcaaaacgtcttgtttatcgggtgctaaaaattctcctatttcgaaattttgtacatcttcttctgttatcatatctgcaaataataacgtttctaaaatatatttatcgtccggttgaaataaactaattgcctgacttagttcaccatcgcgacctgcacggccaatttcttgaatgtagttagaaggacttgttgaaagatgaaagtgaatgattgtgcgaatatcttttttattaatacccataccaaaagcactcgttgcgactataatcggaatatcattatttaaaaattgttgttgaactgtgtgtcgctcttgataattcatatcaccatgataaatgccagtaagaaaacctgaatcataaataagttgcgctaaattcagacacatctttttcgatgagacatagataatcgttggtcccgactgttgtagaaacggcagcaaccactcaattttatcttcatcatcatgaaaattaagatgcttaaagcttatgtttgggcgattcattgtagttttaataacgttgaattgaatcgctaacatttccgtcaaatcatcttgtaaatgcggtggtgcagttgctgtcaacgctaagacaaccgcttctttaaaatgctttgttacttttcctattagagcataatgtggtctgaaatcatatccccattcagataggcaatgtgcttcatctagaacaatcatgccaaagtctatcatagatattaatttaaaatttgacggttgcaggagaaattctggacttagaaagatgaagcggctatgtagtaaacatttaatattatgctttttctcaatttcatccataccagagtgaatacatgttacacgtttttctccatttattttcaactgcataacttggtcatccattaaagatattaacggtgagataattaatgtcggcttacctgataaatacgtaggtatttgataacacaaactctttccacttccagttggaagaatacctagagtgtgttgttgagacattatactttctataatttcctgttgtcccggtttaaaattctcgaagccaaatttgtttcgtaaaatatcatgcaacattcagatcacctctttcaaatccaacgattaatacttttaattgaaaatatgataacgtgtcaaattgttctttgtaaaattttaatcgttcgccacgatgttgttgataaaaattcaaaaactggagttgatcttctagttcaacataatcatcgtaattagacatgtaacctttgattaagatttcaagtacatgatcttcgatagtattgattttaacttgttgttgagccgctatatcttccatcgtgaattgttcaagcaattttgtataagtaatataagtttgatttaataatgtaggtttcattattatttttgataaaatagtatattctccactttctaattcaaacatcattgtcactaaattattcatttcgtattcaaacaattgctgttgagatagtttttctattaaactaacttgctgtctcgtatacattggttcatcatagccttgcaaataataatgtaagtaacatggcccttttaaagttattgctttaaacaagttatgtagttcattttcaaagtcaatttgtaattggttttctttaatgtagttatagacaatctttacagtttcttgtatcttattattttgagagattggtacaaaatgaaaaacatgttgtttggtattagacatggtttgcactaatagttgaattgcttgaaatgtttgccccatgctttcaaatgtatatctaggatgcaacatgatttccatttcagcattaaattcattgattttttctaaaaatagctcaaaagacggatattttaatagtggtaaactgtgatataatgacaactgttgttgactacaagcgtcaaaaaaggtttggtgagatttcttaccaactaagatattgtaaatacttttatttgttttatagttaaatgtttgttgtaatgctgtttttataatgtgttgcaaatttaaccctcactctgtaaaacggataatttgaaaataaaaatgatgctgtctaaaattttagtcacattactattttagcatttttatcaaaggaggcgaagacattggcaaaatatacaatcgttgatatggatacttgtattgcatgtggtgcatgcggtgcagcagcgccagatatatatgattacgacgacgaaggtattgctttcgtaatccttgacgataaccaaggtactgcagaagtacctgaggaattatatgaagatatggaagatgcaattgatggatgccctacagattctattaaaattgcagacgaatcatttgatggggacgctttaaaatttgaataattgattttttagacaaatgttctatagaaaaagcaggcaagctatcgtttattgatagtcacctgctttttattattatgtgtatattattttgctttaatttgattaaattcttttcaagaaattcgcaagccttctatatagtaaaataaatacaatagaaatgacgatacctttaataatattgaatggtataattcctgatacaatgattactttaagattatttgcgatatcagctaagttaaatatcataccgtacaaaggtaatagaacgaaatagttcaaaatactcaacacgatagtcataacgattgttgcaatgattaatccagtaatcaaagattttgttgaacgtttatttttatagatggcgtaagcagttaataagaaacttgcgcctgctaaaaagttagcaaacggcccaactggatcgcccatactaaataagtagttcagcaagtttttaaccagtgcaactacgataccggcaactggtccaaacgtaaatgtagctagtagtgacggtacatcactaaaatctaaagttaagtatggtggcaaaaatggtataggaaacttgataaaagttaacacaaacgcaatcgcgctcaacatacttattgtgataagacgtttattttgttgcatattcaattttctccttccattcatctcgtaagaataggaggattattgcacaacaaaaaacctccatcttctcccatccagactatactgtcggctctagaatctcactagatcagccactaatatgatacatactagcaggtcgcaggctttatttactgccggttgggaattacacccgaccccgaagatgaattttacattattaaatttaattctcattaattttatactatatatcacaaaacctcaataactatgctttaattagatcatagttacattattggagagtgatacattggtgatttgagttcattggttggataggtttgattggtttgtggttttaactgttgttgagatggcttttttgaacctacctttttattgttattagtttaatcattcgtgttagctttttcatgattaaatacacctacttctattacttccttcttactatagttaggtctttttgtatttatatatttattagaaatttgaagagaaacattcagatcatgaggaatattctttttcttttttagtacttcagaaaaatcaatcatctcgtctattgtattatctttagtaaaattatctttagtactaaataaagttgtaacaacatatggacgtgatttatctttaagttgtttttttgagtttctcataccgtccctaaaagacttatcatcctctttgattaagggttgaaaataccttttatattcatctaaagtatatggaattgcagtcaaataataatactcatttctaaaaccactattctgcgttttcataattgcattttcagtataaccagtatatttatatttacttttatattcttttaaaacttctgttaaattatccaactcttccttatgtgctcgatattcaaaaccactcaacactgtaccaactaaagtactcatatcatcgcctttatcctcacttcttaatgagctatcactgtcaataattgatttgtcaaatggaatactcgcattaaatacgatatcgtggtcatcacaatgcacgtatacttctacgccgtcgccactacctacaacattcgtagctttaacttttagaccgaagttatccataaaaaattgttcgccacgtttagcaattttatctttatgcttcttcgcaaattcaatcgcatctttttctgcaggcggttggaatccttggcctacatattttgaagcttccatttcttctggtacagatttcgtttctgtatttgtttctgtatttctgtctttttttgattcattttcaatcgtggagcaccctgacagtactagtgctgctattaagattaattttgcttttttaagcatatctcatcacccatttatgcgcttttataagtttcattttgcatatagttatactcacttaatttatttgcatcttttagttcacctatatataaatcttcaagtacatatacttgcgttaaaaaatctattattttaatttaattattcattaatttagcattttgaagccaatcatctccaaaacccgatgattttaatggattatttggattaattgcctctttagatgttccttgatatattattgtcttttgaccagttggatctccctgatcattaagtagctcgtaggtttttatatcaactgcatctttcatattatcgttatttttatcattaaaataatctatttgtttgaaccgttttccatttactttaaaatcttttttcatttatatcttgataaactcaatatctgctcaattctgctatgtctctatcatttattttaatcactttatattcactcatccttcaattggatttatatcgtcataaaacggctttttagtatttatacttggttttcctaattgaatagtaacttgagatttttgaggcatattgggtttatcttttaatttattactcaattcaatcacatcatctactgtattgtctttagtaaagtttttcttagtagaaaaaagtgtagaaacaacatcagtattagcagtatagtttagctcttttctagctcgttgcataccttctttaaattctttatcctttttatgaatcaatggttcgtaatatttacgatattcttttaaatttcttgataaatatgtaatataaaaatattcattttgatacccgacgttttgcgtcttgttaattgcttctttagtaaaacctgtatattgatatttcttttcattttcttttaaaaatttatataaattatcatacttttctttttgcgctcgatattcaaagccactcagcactgtacccaccatcatactcatatcatcaccgttgtcattactacgcattgatcctttttgatggatggcatctttgtacaaaggtagacttgcattaaatacaatgccatgatcttcgcaatgcacataaacttctacaccatcatctttacctacaacatttgtagctttaacttttagtccaaagttatctttaaagaattgttcacctactttttcaaattctttacgatgcttcttcgcaaattcaatcgcatctttttctgcaggtagttggaagccttgtcctacatattttgaagcttccatttcttctggtactgattttgtttcattgttggattcgttattggtagttgaacatcctgatagtattatcgttgctattaagattagtttaattcttttaaacatagcccatctcccatttatgtgtttgtttagaatatagagaaattagctgatttcaagtcattcgacctcaatccttatagactcattatcactgtaattaactcgattagtgctaatagtagattttgctagttgtaaaaatattttcgtattttcaaaattaaggtgtaactttttcgtactttcagacaaatctaaaacatcatctaattttttgtcctttgaaaagttactacttctcgaaaacaatgttgtatgtacttctattgcagctttatagcctactcctttccttgcttgtttcataccttttttaaaattcagattatttttctttattaggggttcgtaatatttcctatattcttggagcgtcggtatattagcaactatataaaaatattcattttcatatccactattttgtgttttgttaattgcctctttagtaaatcctgtatattggtatttcttttcattttcttttaaaaatttatataaattatcatacttttctttttgcgctcgatattcaaagccactcaacactgtaccaactaaagtactcatatcatcgcctttatcctcacttcttaatgagctatcactctcaattattgatttgtcaaatggaatacttgcattaaatacgatgtcgtggtcatcacaatgcacgaatacttctacaccgtcgccactacctacaacatttgtagctttaacttttagtccaaagttatccataaaaaattgttcgccacgtttagcaattttatctttatgcttcttcgaaaattcaatcgcatctttttctgcaggtggttggaagccttgtcctacatattttgaagcttccatttcttctggcactgattttgtttcattgttggattcgttattggtagttgaacatcctgatagtagtatcgttgctattaagattagttttgttcttttaaacatagctcatcacccatttatgtgtttgtaaaacttttatgttaaaaaaactacttattctcaaagaaaacaagtagcatttaataaattacttagtatacagctagtttttctaattgttctttaacttgaattaagtttgaccgtattagagaggcagattgatccatcgtttgaattgcttgtccttcattttcgttcaagccattacaaacaacttcaaactgttgtgccatttgatcaagacgtgcatgagcttgtgtgtttaaaataaacatatcatcataatgtgatggttcaaataacatctgtacaatcaaaggcttcatgttcttaacaatatcatctaaatggttatctaaaattggtgacactgcttttaaatcattaagaaatggctcccatttgcctaaagtattatctaattcttctaatttagttttaatataattacaagttacattaggaatcagggacaaaaattctttcttttttacatttaacatttcaattgcatgtcttaaattcttacgtattttgggaattgtattaatcaaatattttattacatcaacaattttcgatgcatattcatcatatatactttgaacatagtctgctatttttttaataccatcatcgatatggtcttttaatattttcatttttcttcctaaataattagaaggtataactagaccctgtaccatattttcgccgctacaattaatttggaaattcccatctaaaattgttgcatcttgttgtttcataatacttctaatttctgcaatttgcctaccataaatatcattttgattttttattcgctctatattctgtttcactactttcaaatgtttcatcatttcttcagatactccatctctgaagtcgtgatctatatttttgaaaatttctaaaatttcattatctatactatcatacactttttctataaaagattttatacctttaaacaactcattaattctttcttttaatgcatccaatgcaaaatcaggtaataagtgtttaacagcactaatactttctattgtttcatctgcaacttcttcaagtgagtttattttactaattaaagttctttccatttcttctaattgaaataagttaatcttatccttaaatccttctgataattgttgctttctatctgcaaaatttttattttcattttctgagatgttaaaactttcatttaaaaagattacgcattctgctaacataccactagtttcaccagtaatcagtttactcaacgcatcaagattttctaaattaagtttaattaaagttcctcttccagaacgtgcaatcgaatcccctgtccaaacatttatcggaattcgcccatccatatctaatgttatgttaatagtcttttttactttttttccatttttaatttctgtatcttttaccgacttaattttgattagtggtacagtatcgtatgtgttgtcttttctatttaacttccttttataacctacatggctgtctattaaagcatctaacctgggcacaccatcactaatgttaacgcgttttcctggcatatctttgatgaatggatcttgtaaccatgttaataaatcgttggtactattaaaactaatcatattatcaaagcgtggtctagcaaatttctgccaagcagcataaggtaccattgctgggtcagtagcaacaactttttcatttggatgtttcgctccttgatattttgctcctgcaccgccttccgaattaccgccatccgccacaatggttttgtttttgtaattatttggactaacaccatatttttgtgtaaagttatacttacttaatttattagcgtcatttagtttgtctctatataaatctgcaaattcgtctgattgcttaagataatccgttgacttattactattatccattaatttcgcattttgtaaccaatcatctccgatatctaaagattttaatggattattagggtttattgcctcattagatgttccttgataaatcatggtttgttcaccagttggttttcctttttcatccaacaattcataaatttttaaatctgaggcaccttttttatttttatttccattatcattatattcatcaacctgcttaaatctttttccgttaactgtaaaatcattatctttattgatgtcttgataaacccagtaactactcaattctgttaagtctctatcattaattttattcatcttcaaatgctccaaacgacactactttcttatcatcaaaacgagctttttttgtgccaataagtttatttcctaattgagtagttatagtattcttgattggcatatcttttgttctttcaattttctcggataaatctattacattatttatcttttcttttctattttttttatcattcgtactaaacaacgttgctactgtattactattagcagtataatctaactcttttctagctcgttgcataccctctttaaattctttatcatttttatgaatcaacggttcgtaatatttacgatattcttttaagtttcttgataaatatgtgatataaaagtattcattttgatatccaacgttttgtgtcttgttaattgcctcttttgtaaagcctgtatattgatatttcttttcattttctttgaagaatttatataagttatcatacttttctttttgcgctcgatattcaaagccactcagcactgtacccaccatcatactcatatcatcaccattgtcattactgcgcattgatcctttttgatggatggcatctttgtacaaaggtagacttgcattaaatacaatgccatgatcttcgcaatgcacataaacttctacaccatcatctttacctacaacatttgtagctttaacttttagtccaaagttatctttaaagaattgttcacctactttttcaaattctttacgatgcttcttcgcaaattcaatcgcatctttttctgcaggtggttggaagccttgtcctacatattttgaagcttccatttcttctggtactgattttgtttctgtattcgtgtctttacttgattcattttccatcatggaacatccccctaaaattaatgtcgtagctaaaactgatccaatgaattttttcatatgacacctcgaataatttaattattacaatatatctatattttaccctatttttataatcaaataaataactttatcaaactttatatttttatataaattagtaatatatttaatagttgatattcgcaaaaaccctaatcctaatccacttacaaaactttcgacatcaatcaaaaaacgcatgctataaattagagtctctaatcaataacatgcgttcttaaataactatattcagttttattctggttttggtagtttaataataaatgttgtgccttttcctaattcgcttttaacatcaatggaaccaccatgctcttcgataatcattttacaaatgaacaaacctaaaccggtaccttgtttacctcgcgttctcgctgcatcaactttataaaaacgatcaaatacttgttgtaaatgttctggtgcaatgcctgtgcctgtatctttaatgtataaaatatcttcgctttcattttcatcacaagtaattgcaatttcatctccaggtttcgtataacgtgatgcattatcaattaagttcgttagtacttggtccatgcgatccatatcataactccaaacacgcttcttacaataattaaaagtcatatttagacctaaatcatcagcttgttggcgatacttaattttcatcttatctagtaacgctgcaataggctgaacttctttatttacggataacccttcagcatccatgcgtgcgacatttaacaattcattaactaatcgatttaaacgtttcgattcatcaaggacaacggcgagcgattcttttatttcatccggttctgtaacaataccatctacaattgattcagtataaccttgtagtaatgatataggtgttcgtaattcatgtgatacattagcaatgaaatctttcttcatttgatctagattgtgctcattagtcatatcacgaactgtcacaacaacaccacttttacctccctgttcaatcttatcgatatagcttgtggtcacaacaaagaatcgtgcattcatttctaaatcacgcatttccgtttgttttgatttaaaagtatcttcaatttgtcttaataagaaagctttagcatcttcatcaatattgtccataatatcattcgccatcttattagataagataatttgtcgactctcattaatacctaggacaccttctaccatagagttaattaagctgtctctaatatttttagatgtggataatgcgtcgacatgctcttcgatttctgtactcatctgattaaatgcctgcgataattgaccaatttcatctttcgttgtgacagaaggtttataagagtaatccccttcagatacacgtgtagcttggtctcttaaacgtcttaaaggttttgtaattcttgacgataagaaaaacgcaaagactgttgtaattgttaagaaaataacagccgtaattatagtgataatcgtaatagcattatttgtatcttcgattgatttcaagtctttatatataaagactccactatatttgctatgactattcttctgtgcttttgttggatagcctaacaaaatatatgtttgagatgaacccttttctttaatcgttacatttcgagtaacagatttacctttatcaaacacatcgtcaaaatggtcgttgttgactacttcattcaacatttgctttttaatattagaaagtgaagccgttgattgacgatgtttattatttataatcatcaacccaccaggattttcaattaatgtttgactatattttattgcttcttctttattatgtgattgttcgaccagtgaacttatacgtctagcatcttctcttatggcattttcggtttcttgtgtgaaatagtattgcataaaggtaattaaagcaatacttaataaaattaaaactgtcgtcactattaaaataatagttaaccacagtttaattacgacactatttagccggctcatcattagatttaacctcaaatttatacccaacgccccagactgtttgaatcatatgcgcagcttcgctagacacacgatttaacttttctctaagtcgtttaacatgagtatcaactgttcttaaatcaccatagaattcataatgccaaacttcttttaataattgttcacggtcaaatactttatttggtgttttagctaaatatattaataattcgtactctttaggagtcaaattaacttcttgattatcagcaagtacgcgatgtgcatcattatctatttctaaatgtttaaattcaatcacatcacgtgcgtgaggttcgctttgttctacagttgtagattgcgttcttcttagaagtgctttaactcttaagactacttctcttggtgaaaatggtttgacgatataatcatctgcaccagattcaaaaccttcaacacggtttgtttcttcacctttagcagtcaacataataatcggtgtttgtttatgttcacgcaatttagttgccacctggataccatccatttcaggcaacattaaatctagtagtatgcaagcataattattctccattgcaagttcataagcctcttggccattacttgcttcatggatttcaaaagattctctttctaaatacattttaagtaatcttctgattctatcctcatcatctacgataagtatttcgttcgacatacaggtcatacctcccacacatgcttttctttacaaaagtattatatcacaggaaagcgcatacagttattaaaaacctaaaattttgtgaaaaaattctcaaactttgtgataaatacatattttatttaattatttcccatgttctgctaaatgacgcatcacttttacttcatgaggcgtcaatacacgtccttcaccagcattcaaaccgacaacatttaaaggcccatattcaatacgagacagtttcgtcacttgatgaccaaaatgttcgaacattcttctgacttggcgattacgaccttctgtaattgtaatttcaaccaatgttgtgtttttatctttatcttgtttcttaactttcacttcagccggttgcgtcataccatcttctaattcaatacctttttctagggctttcacttcttctctcattaagtaaccttttaattttgctacatatttcttcttaatttgatatcttggatgtgtcattaaattagtaaattcaccatcatttgtaagtaataacaatccagaagtatcatagtctaaacgaccaacaggataaatacgtgcttctatatctttaaagtaatctgtaaccactgtacgtcctctatcatcagatacacttgttatcacttgagttggtttatggaataaaatgtaaattttgtcttctagttctattttaataccttcaacttcaatcgtatctgatggcttcacttttgttcctaattcagtgacagtcgtaccattcactttcacttttccttcagaaattaaagtttctgccttacgtcttgaagtataaccgctattagctatacgtttttgtaatcgttctaattctttagtcattattttctcctttttgattgactagattactgaaaaaagcatccatttcttcatcgtcttcttcagttgtcggcaaatcttctatattggaaataccaaatacatttaaaaataaatcagtagtaattaactgttggctacgctgttcattaaccactttagcctcaactagtcctttggcaatcaatgtcttaactgcaccatctgaattgatactacgaattaattcaatatcacttcttgataatggctggttataagcaataattgatagtacttccattgctgcttgtgataatttcatttgtgacttttgttcaattaattgttcaatatacgttgccgcttcttttttagtcgttaaaacatacgtcgttccaaatcgttgtatcattaatccatgtgatgaataattttcaattaattcaacgagttggtctttcgacatatctaatatttctaatagttgtttttcatctaaaccttcatcgccagctgtaaataaaagcgactctaatataccatgattatccaaaatggtagttcactcctctaataatgttaatatcttcaaaattacgttgttgctcaatattaattattcctgcttttgacatctctaaaatagctaaaaagtgagtgactacttgttcaattggctcagaaaacgtaaacagactaaagaagttaaaatgatctttatctttcaatctcgatgtcacttgttctgtagcttgttgaatggtaaatgtctcttttcggatttcaacagatttaggtgtatttaactcaactctatttttaactctttgataagctacaattaattcagttaaatcaatcgtatgatttggatcccaagattcatctgtttccaaatgagataaatctgtcggtctttttgtaaaataaaaatctctttcttctttcatgtcatttaaaatagcagtatattctttataattttgatattctattaaacgcccaactaaatcttcccgtgggtcatcatcaacatccatatctgatgttgattgtggtaatagcatcttacttttaatcattaagagttctgacgctaatactaggtattcacttgcaatattaatttcaagctgtttcattgcatgaacgtactgcatatactgctctgttaatgcttgcataggaatatcataaatatctatttcaaatttttggataagatgcagcaataaatctaatggtccattgaaagcatctaatttaacttcatacataatatctacctcgtattgcgtcatatgtgcataattctctaaaatattatagcatgaaaataacttacttttaaattggggtgataacaaaatgcaacaggcactgataaatttctattatcaatttcatactaagcaacattatttcctatgtcatgacattttagaagatgcatggaaagctgaaaataactacagtaagcaagatgcagttgttagtttaatcttgtttgcaactgcttgttaccattatcgccgcaataatttaaaaggcgcctataagtcttttaataaatctaaagaaataatacaaaatgctaaagatagagatgcgttataccttaatttaaatgattatcaattgttaattgagcaacagattgcaaaattgaatgcagcaaagcctttttcatctgttatattaccaataactccagtctttgaacgcatcatcaaggccaactatccagactatgattataatcaggaaacagcaacagatccttttattgtagaccatcacatgcggcgtgatcgttcagaagtgattgcagcaaaagaagaagcgattcaattaagaaaacatagacgtaattaatcaaccaatttaaaaaagccacaatagcacagacatttttagtcatgtgtattgtgacttttaagttatggttcactttatgctctaggatgaaattggttatacatttttctaatttgagatttcgaaacatgtgtatagagttgggtagtagatatgtcagagtgacctaacatctcttgcactgctcttaaatctgcgccattttccaataaatgtgtcgcaaaagagtggcgtaacgtatgtggcgttaacgtctttttaatgtttgcctttacgccattttgtttaatcattttccatattgcttgtcgtgataaaggtttaccatgcatatttaaaaataagacttcagtaacagtcttttttaaaagttgcggtctaatcgtttcaatataagtagttaagtactcaatgactgcgtcgcctaatggtacaattctttctttatcgcctttaccaaatacgcgtacaaatcccattattaagttcacgttttctaactctaaatgtatcaattcagatacacgcattcccgttgcgtacagaagttctaacatcgtacgatcacgatatccattaattttatttaaatctggcgtttctaataaagccaatacttcgtcaacatttaaaacgtcaggcaattttttgtcatattttggtgaatctaataataccgttggatctttcgccgcatatttttctcttatagcaaattgatgaaaactacggattgttgaaataaatcgcgcaatagatttagcagattgcccttggtctattaaatgccccaaacactcttgaattaattgtcgatctataaaatcaatatgcgagatatgatgttcagtcatataatcttgatactttttcaaatcacgtctataagcaccaattgtgttagaacttagtcctttttcaatttgtataaaacgcaaatattcttcaataattgtttccataaccacacctctaaaaaaagcgaaggttaatttaacctacgcaatttactatcctttacctttagcttggcatgtttcacacacaccatggaaagttaaacgatgatctaaaattttaaaattgaactcattttcaactcgattttcaacttctggtaacaaatcttcatcgatttcatctacacgaccacattccatacatactaaatgatggtggaaatgttttgcgccttcttttcttaaatcaaaacgagcgacgccatcaccaaagttaattttgtcgacaacttttagttcagctaacaactctaacgttctgtatactgtcgccaagccaatttcaggcgctttgtcttttactttcagatatacgtcttcagcacttagatgatctttttcattttcaattagaactctaacagtagcttcgcgttgtggcgttagcttatatgatgattgttgtaattgttgcttaacgcgatttaatcgttcttccaacgatgtccactcccctactaataattaaaatcattacaaattatttcaaacttcacaattaaaactaacagttttctcaataaaatgcaagcttttctcatttgttatttagaatgattataatttaataataggtgttgcaatgcaatgatagtcttcgcatcttctatttctttattcattagcatcgatttaacattctcaatcggaactttaatgacttcgacaaattcatcttcatctaagtgaactgtaccttcttctaaattatcagtaaaataaattgataattgttcatcgcaaaaacctggtgaaccatacatatctacaacatgtgttaactctttggcaatatatcctgtttcttcttctaattcacgcttagccgcttcgactctattttcatcatcttctaatttaccagctggaatttctagcaatggtttttctactggtttacgatactgtttcactaatacgacttcttttttaggtgtcaatgcacaaacagcaactgcaccattatgataaactaattctcttgttgacgtttcaccgtttggtaatgtcactgtatgaatttctacatctacaattttgccattataaataactgttcgatcaattgttttttcatttaaatccattataatcacgttcctttaaattcatattatatattgatacactatgcttgttagctaaagtgtatcgaaaggagaacagacatgcaaaaaaatatattaaaaagtggtattgcattatctgaattaggtctaggttgcatgagtttaggtacagatttaaaaaaagccgaacaaattatagattgtgctgttgaaaatggtatcacttattttgatacagcagacatgtacgataaaggtataaatgaatcagttgttggtaaggcacttcttaaatatcaacaacgcgatgatattttcattggtacaaaagtaggcaatcgtttaacaaaagatggcagtacaacatgggatccgagtaaatcctatattaaagaggcagttaaaggttcactaaagcgtttaggtatcgatcatatcgatttatatcaacttcatggcggaaccattgatgacccattagacgaaacaataagcgcatttgatgaattgaaacaagaaggaattatacgtgcttacggtatttcttctattcgcccaaatgtaattgattattatttaaaacatagtcaaatcgaaacgataatgtctcaattcaatttgattgataatcgtccagaatcattattagatgcaattcacaacaatgatgttaaagtattggcaagaggacctgtgtctaaaggattattaacttcaaacagtgttaatgtgctcgacaataaatttaaagatggtatttttgattattctcatgatgaattgggtgaaacaatagcctctattaaagaaattgaaagtaatttatctgcattgacatttagttatttaacatcacatgacgtgcttggttccatcattgtaggtgcaagtagcgtcgaccaattaaaagaaaatattgaaaactatcatactaaagttggtttagatcagattaaaacagcaagagctcgtgtaaaggatttggaatataccaatcatttagtgtagaagtcattttcagtaataaaaacagcagcatgaggcgtttcattataaaaatgccttactgctgttgtttatgtacaattcgctataatttatgattatgattactcacttatgatagaaattaaagcgttgtcctcacgcatcagtatttagtaatttcgccttgcggcattgccttaagcaaacttctgccacttcatctcttaataattttattaaaacatctttctatatttcacttcgcatgttgattcatcattattagttattatttgtacacccagcacatttccttgcaacacaagtagtttgaatttttcacaagtataatataatgtaccgtctgaaatttggtctacagaaatatcgcctaaaatatccagcactgtaaattcttcaaatactgatagttgttccgcatatcgtacacaaagtcttaccacactctccgattgacagttcattgccatcccacctatttatgctttatttttaaataatttagggaaacatcgttcaaaaaatctaggcgcaatttgatacattttcaacgcatgatgcatccatttaggccgattaatttccaattgttttgttttaatgccataaatgatatcttctgcaagctgattagcatcaagcataatttcccccatctttttagcatacttcattgatgggtcggctttttgatgaaaaggtgtatcaatcgggccaacattaactgtcatgatatgtaagtttggtgactctagtcttaaagcattcattaatgcataaaaccctgctttcgatgccccataatgtgcagcatttgcttgtgtggaaaatgcagcttgacttgaaatacctacaatatgtgcgttagatgttaaatatggtctcaacacagtatataaaacattaaaactaattaaattaagctgatacgtttcaatcatttctgaaaaactatggtctgaaatagatttgaaataacctaaacctgcactataaatgaatccatcgaatgatgtattgtcttcaaattgcagtgcctgtatcgacttcaaatcatttaagtcacaaggaataacatttatagttttccccaattcttgttcaaagattctagttgctttatcaacatcacgcaccaacaacgttacatgcactttattttctagtaactttcggacaatcgataaacctaaaccactcgtaccaccagtcactataaaatgttgtcctttcatcaattaaccttccttttcaattatatagaatgcaatttatcgtctctgtataattgagacaagttgattatctttcctaatatatatacaataataagaaaatataacatacaaatcaaaaactaaagggatgtgacgttaatgaaactcgtattttatggagctggtaatatggcacaagctatatttacaggaattattaactcaagcaacttagatgccaatgatatatatttaacaaataaatctaatgaacaagctttaaaagcattcgctgaaaaactaggtgttaactatagttatgatgatgcgacattattaaaagatgcagattatgtttttttaggtaccaaaccgcatgactttgatgctctagcaacacgcatcaaaccacatatcacaaaagacaattgcttcatttcaattatggcaggtattccgattgattatattaaacaacaattagaatgccaaaatccagttgctagaattatgccaaacacaaatgcgcaagttggacactcagttactggcattagtttttcaaacaactttgaccctaaatctaaagatgaaattaacgatttagttaaagcatttggttctgtaattgaagtatcagaggatcatttacatcaagtaacagctatcaccggaagcggcccagcatttttatatcatgtattcgagcaatacgttaaagctggtacgaaacttggtctagaaaaagaacaagttgaagaatctatacgcaaccttattataggtacaagtaagatgattgaacgttcagatttgagcatggctcaattaagaaaaaatattacctctaaaggtggtacgacacaagctggccttgatacattgtcacaatatgatttagtatctattttcgaagattgtctaaatgctgccgtcgaccgtagtattgaactttctaatgtagaagaccaataaaaacaaacccgccaacacatgtatgcatcatcacatacatagttggacgggttatttttataaattattactatttggcaagcattgtttattactttgtcattagactttaaaactatcaaaatcttttacaaaattaaaattaggtgtatcttcattttgtatcaatatttgataaatttcatttatatcttctgtattatagcgattgctcaaatgtgtaatcaacgtacgtttaacattggcttcttttatcaatgcaaatacgtcttcaatatggctatgatgataattgttggctaaatgcttttcaccatctatataggtcgcttcatgtaccatcacatcagcatctctagaaatcacacgttcattagaacatggttttgtatcaccaaaaattgctacaactggaccctgtttggactcacctctaaaatcttttgattgataaacttgaccattatgttcaaatgtatcatgagattttacttcttgatatttaggacctggttcaagaccaatgttttttaacgcttcaacattgattgtacctgtagtttcaggtgccattactctatatccatatgatggaataccatgattaagtaaatgcgcctctacagtaaaaccatcatgatgatatgtcagatgatcatcgatttcaatatatgtaattggatagtttaaatgtgactctgataaattcatagacatttccacatatgctttaattccttttggtccaaccaatgtaagcggcttctgttcaccgccctgaaaagaacgactagaaagtaatcctggcaaaccaaaaatatgatcgccatgcatatgagtaataaatatatgtgtcacttttcctaatttgattgcatgatgtaaaatttggtgctgtgtaccttcaccaacgtcgaaaagccatatggaattggaatatggttctaaatttaaggcgattgcttgtgtatttctctcttttgtaggcaaacctgcactcgttccaaaaaatgtaacttccatatatgcccctccttttcttcaattcattttatcataaaatttgtatcaatttagttttaatttatacttgaatcaaaatctgttaaaaattcgtctttgctagttaatttttctaactttaacgtagacataactatataaattttgacaattacgttatacttatcattaataagtatcacattaaacatgatacatgaatcgatatttcatttaagacactgcatactgtcgagcatattgaatgacctgctgaatggattatcttataataataaatcatatatctaattaagaattgaggttttaatcttgagtactaaaaacaaacacatcccttgtttaatcacaatctttggtgcaactggtgacttaagccatcgtaagttgtttccatcaatattccatctctaccaacaagacaatttagatgaacatattgccatcatcggtattggacgtcgtgacattactaatgatgatttccgtaatcaagtaaaatcatcaattcaaaagcacgtaaaagatacaaacaaaattgacgcgtttatggaacatgtcttctatcatagacatgatgttagtaatgaagaaagctatcaagaattactagattttagtaatgaattagatagccaatttgaattaaaaggtaatcgactattctatttagcaatggcaccacaattctttggcgttatttctgattatctaaaatcttctggtcttactgatacaaaaggatttaaacgccttgttatcgaaaaaccattcggtagtgatttaaaatcagccgaagcattaaacaatcaaattcgtaaatcatttaaagaagaagaaatttatcgtattgaccactatttaggaaaagacatggttcaaaatatcgaggtattacgttttgcgaatgcgatgtttgaaccattatggaataacaaatatatttcaaacatccaagttacatcttctgaaatactaggtgttgaagatcgtggtggttattatgaatcaagtggcgcgctaaaagatatggtgcaaaaccacatgttacaaatggttgcattattagctatggaagcacctattagtttaaacagtgaagatatccgtgctgagaaagtaaaagtacttaaatcactgcgtcatttccaatctgaagatgttaaaaagaactttgttcgtggtcaatatggcgaaggctatatcgatggtaaacaagttaaagcataccgtgatgaagatcgcgttgcagatgactctaacacacctacctttgtttcaggtaaattaacaattgataactttagatgggctggtgtaccattctatattcgtactggtaaacgtatgaaatctaaaacaattcaagttgtcgttgaatttaaagaagtaccaatgaacttatactatgaaactgataaactattagattcaaacctattagtaatcaatatccaacctaatgaaggtgtatctttacatctaaatgctaagaaaaatacacaaggtatcgaaactgaacctgttcaattgtcttattcaatgagcgctcaagataaaatgaatactgtagatgcatatgaaaatctattattcgattgtcttaaaggtgatgccactaacttcacgcactgggaagaattaaaatcaacatggaaatttgttgatgcaattcaagatgaatggaatatggttgatccagaattccctaactatgaatcaggtactaatggtccattagaaagtgatttactacttgctcgtgatggtaaccattggtgggacgatattcaataattgaattaaaacgcacatgttaaacaaaaataaatgagcgaatgacaaggattgattacgaatcaagtaaatcaattgttctatcattcgctttttttctagactatattatgaaattatattttacaatgcccaaaactattttaataatcattgaacaaatgggtgtataatttatagaaataatgtagaataaaaataaatgattgaattaattggagtgaaagttttggacgttatcaagcaaatacaacaggcaattgtttatattgaagatcgtttattagagcctttcaatttgcaagaattaagtgattacgttggtctttcgccataccatcttgatcaatcatttaaaatgattgtcggcttatctccagaagcttatgcacgcgcgcgtaaaatgacactcgctgcaaatgatgtgattaatggtgctacacgacttgtagatatcgctaaaaaatatcactatgcaaattcaaatgattttgcaaatgattttagtgattttcacggcgtatcacctattcaagcttctactaaaaaagatgaattacaaattcaagagcgattatatatcaaattatcaactactgagagagcaccctatccatacagattagaagagacagatgatatttcattggttggatatgcacgatttatagacactaagtatttgtcacatccttttaatgttccggattttttagaagacttgctcattgatggtaaaattaaagagttacgacgatataatgacgttagtccatttgaactatttgttattagttgtcctcttgaaaatggtttagaaatatttgtaggtgtaccaagtgaacgttatcctgcacacttagaaagccgatttttacctggcaaacattgtgcgaaattcaatttacaaggtgaaattgattatgcaactaatgaagcttggtactatattgaatcaagtttgcagttaacattgccatatgaacgaaatgatttatatgttgaagtgtaccctctcgatatttcatttaatgacccattcactaaaattcagctttggattcctgttaaacagagtccttatgacgaagattaaaaattaaaaacaaagaagccccctaatatatctataggtctacaaatggccttagattctattagggggcatattaatatgttaatttagttcgataacacatgcttcatatggacgtaactgttttaaattaactttggcatcataattaaatagctttacttctccatggcttaaatcaaatggtacagttaattctgcttcgtggttagtaagattacctacaataagaacttgcttttcatttaatgttctcgtgtacgcaaaaacttgtgaattttcagcatctactaaatcaaattgaccatatacgtatacatcattagactttcttaattgaattaaatctttataaaattgtaatactgaatgctcatcttctaattgttgtgcaacattgatagttttataattcagattcactgggaaccacggttcaccatttgtaaatcctccatttaacgtatcatcccattgcattggtgtgcgagaattatctcggttctcatctttatatttcgcaagtaaagcgtctacatctccaccttgagctttcactatttgatagtcattttttacagcaacatcgttaaacgtttcaatactttcaaatggataattcgtcataccaatttcttgaccttgataaatgaatggcgtaccttgttgcaagaaataaacagctgcatgacttgttgctgattcataccaatacttgtcatcgtcaccccacgtcgatacacgtcgtggttggtcgtgattttcaataaacaacgcattccaacctttattttcaagttgtttttgccatctatttaatacagatttatacgaatttacatcaaagtgagaatcaccactattccacagtcccaaatgttcaaattggaatatcatattaaatttaccattttcttccccgacccagtcatcagcatcatcagggcttacaccattcgcttcaccgacagtcataatgtcatacttacttaatgagcgatctttcatctcttgtaaccaagtttgtatacctggctgattcatatctacatcaaatgctggggcatatgttttaccctcaggtacaggtaagtcacccgcttcaaacgtcttcttaatatgcgtaattgcatctactctaaatccatcaatgcctttatcaaaccaccagttcatcatttcaaatacagcatctctaacttctggattaccccaattcaaatcaggttgttttttactgaataaatggaaataatattgctcagtattagcatcatattcccatgtagatccattaaagatactttcccagttgttaggttcagagccatctggctttggatcttgccaaatataccaatcacgtttgggattgtctttactagatttagattctataaaccaaggatgttcatcagatgtatgatttacaactaaatctaaaataagcttcatgcctctatcatgaataccttttaataaacaatcaaagtcttccatcgttccaaattcatccataatttcttgatagtcactaatatcataaccattgtcatcattaggtgatttaaacattggactgagccaaatgacatcgatacctaaatcttttaagtagtccaatttatcaatcattccaggtaaatccccaataccatcgtgattactatcattaaaacttcttggatatacttgatatgctactgcttctttccaccattgcttattcattttaaaactcctttgctatcgctgtgttgattttcttatttttaattctgtatctataatgacgagttcaataacatcctgtgctttgtttttcaatatatttaaaattgctgaaccagcctgttgacctaacattcgaggcttgatgtcaatacaggtttgaggtggtgacgcaatttcggttaaataagaatcattgaacgttgctgtcattacatctttcggaatttcaatattaagttcatataggacacttaaaatcgctaaatgtaacatagcatctaacgaaatgattgcctgtttaatatttgggtccttcaaacgcgtatgtagattttgcatgtaatttaaaataacttctctttcattactagtctcaataatttgataatccagattaaattgtgatgcaaccgtttcaaatccttgaattctatcttttgaaacttcaaaatttcctttttctgtaataaatattaattcatctacaccttgttcaataacatgtcgtgtcaaattttcagaagctaatatattatcattatctatgtgtgtaaattgatgatctatatccgatgtaggcttaccaatcacaataaatggcatgctttcatcaattaacatttgtttaattggatcattttcttttgaataaagcagtataaacgcatcaaccattcgttgtttaatcattttataaacttcatccattaaatcattcatattatttgagactgtcgtttgtgtaccatagccatgctggttacacgtttcagaaattcctagcaatacattgatgtagaatggattcagtcgaataggctcctcagacccttttaacactaaaccaattttatatgtttggtttgtaattaaagttctagcagcggtattaggaaaataattcaattcttccataactttcttcacttttgaaattgtcgcttcgctaatacgtttatttccttttataactcttgaaactgtcgaaggagaaacaccggcttttagtgcaacatctttaatcgtaaccatttaatcacctcctgttaatttctgcattggaaaacgcttccaacctctatataataacagtttagttactctttctaaaaaagtcaaaagatttgtgcaaacgattgcataaaacgataaaaataaaaccttcatactgaaattcaatccgaaaatcaatataaaggtttgtataaatattaaaatcgattgtttagtcactaactgcaaaataattaccttgtccatcttggaaattaaatacacgttgaccatccatttctactatatcatgcccagttaaacctaaatcatttaattttgagtataatgcatcaaagtttttctctttaaacattaaagatggtgttcctaggttcacctctggactatgcttttcaataaattcttttgccataatcgtcaatgacgtttcagcatctttggtaggtgatacttcaactgcaacatagtcctcagctaacggtgtttcacttacaacaacaaattctaaagtttctgtccaaaatgctttcgctttttcaacatcatcaacatataacataacttgatttaacttttccataaaatagtacctctatttctctatagtacatgctatcataacacagtaaatattttattacttcacaaaatgcttaaaaatatggcgggatgcttttaaggtaatagatattgcttgtgtaattttttaaattttgtagccacatagaacttcattaatcaaacatgtcgtctgggacatatatcaatgaaatacttcgttcaaagttttcgtattttctatgtcaacttaactgggtgtagctcacattgtccattagaatgtataactaacataataaaattaattaaacgtacatcatttgattatggaagttacaatcatttgcgcaatcgaatattattatgttcaaaactttaagctccaataactaaaaagaaagttatacaatgtttagttgcctaacttcctatattgaattcatcagtccaatttgacatagcagccatttttattaattttcttcttaatattcttcaacttgataaaatctatttttcagtatatataacactaatggtataaataacacagcactgatcgtaagtgcataaaatccacctttattttcaagtaatataccgcctaaaaaaaggcctataggtctgaatgcaaaaaccattgttttaaaaacactattaacacgtcctaacatattttctgaacatttcttttgcctcagtgtgattatcgctatatttaaaatggattgtgtcatatatgtcaaccctaaaagtgggatgagtataaaaatataagtactaaatggtaacattaatctaaaaattgtatctaaaaataatataattacaattagttttccgaaattaaataatttcaagagaaaacttgcagataatgaaccgattagcgcacctaatgatgagatacctaaaactaaccccaatgcttgagatgattgattcatgtcttcctttacaaacattactatataaatataataaggtgagataattagattggataaacttacaacaacagccattactctaatagttgaattagataatagataatcaaatccaactttaacatcgctcaaaaaattttttccactcaacttttcttgattgaatatactctttgtttcaattttaattaatatcaaactgaaaaatgagagtaaaaaagtcatagaatctataaaaatcaatattgaatatcccatatatgtataaagtaaacctccaattatagggcccaaaaattccgaaacattttgagtagcgtatatataactgtttgcgctcgccaaatcttcttcttttacaatacttgggattatcgaaacctcagaaatactgtgaaatactaatccaatacctgaaatgattgcaactacataaatttgaaagatgcttaacatattgaaaaaacttaatactggtatacttaaatatgaaacgaacctaattatatcagcacatttcattatggtcttcttattcaatctgtcaattaaagcaccagctggcaatcctaaaattgcataaggtataaaacttagtgcagaaactatgccaacttgaaatgcagatccagtaagctttaaaatcattaatggaaaaacaaacgtagtaaaagcactgcccatgttagaaaaagctatccctattaaataaaaagtaaagttcttattaaacaatacagaagtatatgacattctatccctcttattcatcaaataataaaacgtaatctatttatcgaaatattaaaattatttactaatgctatcttaatagtatgtaagtaaaacgtctacacttaaacggacaaattctatgaggatagatatcgttaatttataaaagttgaaaattttaatttgacaagagaaagaaaatcattgaatatatcatgcgtagaaaatttcgataaatacataaggaaagagacaatttctatcaaataaataatagaaattgtctctttaacattacctaaattcataaggtctcaggctcaatggtcaatattattcttcaatccattgtgtatggaatacgccttctttatcttttctttcgtacgtgtgagcaccgaagtagtcacgttgtgcttgaattaagtttgcaggtaaatcagctgcacggtaactatcatagtaattaatacttgatgagaaaccaggtgttggtacaccattttgaacaccagttgcgacaacatcacgtaacgcatcttgatattcagtaacgatgtttttaaagtaaggatctagcaataagttttgtaatcctggattattatcgtaagcatctttgatcttttgtaagaattgtgcacgtataatgcaaccttctctccaaatcatagctaaatcaccaagttttaaattccattcattatcttcacttgctttacgcatttgcgcgaaaccttgtgcataagaacaaattttactcatatataatgctttacgaattttttctaaaaagtctttcttatcaccatcaaatgatgcttttggaccatttaattctttagaagcatttacgcgctcttctttgattgaagagataaaacgtgcaaatacagattcagtaatgattgttaatggaatacctaattctaatgcattaattgaagtccattttcctgtacctttttgacctgcagtatcaagaattttttcaactaatgcttctttattttcatctaatttcatgaaaatatcaccagtgatttcaattaaataactttctaattcaccagcattccagtctttgaacgtttgagcaatgtcttcatgagacatacctaataattctttcatcatagcataactttctgcaattaattgcatgtcagcatattcaataccattatgtaccattttcacatagtgtccagcaccatttggtccaatataagtaacacatgaagcaccgtcttttgccttagcagcaattgcatcaagaatatctgcaactttgttataagcttcttcttgtccacccggcattaatgacggaccagttaacgctccaatttcaccaccagaaacgcccataccaataaagttgattgcactttgtgctaatgctttattacgtctgatagtatcttgatagtttgtattaccaccatcaattaaaatatctccatcatctaataaaggtaacaaactatcaattgttgcatccgtagctttacctgcttgaaccattaataaaattttacgtggtttttctaaagaattaacaaattcttccaatgaatacgttggatgaatatttttcccttttgattcttcaaccattaaatcagttttttcacttgagcggttaaatacagatacactatatccgcgtgattcaatattccaagctaggtttttacccataacggctaaaccaataactccaatttgttgtgtcatattacttacctcacttgttgatttttcattagtattgtatcacaaaatagacatacactacactaaatcatttcgattgtcgcgcaactattttgattatttctaacacttgacttgcaagcaagttcaatgatttaatcggcattctctcatttgttgtatggattttttcataacccactcctaaaatgactgaaggaataccaaatgtattaataatactgccgtctgaaccgccaccagaaataattgtatttgcagataatcctaaattacgagcactttcttgtgcaattttaacaaccgcttcattatcattaattttaaatcctggataactttgctccactgtaacttctgctttcccacctaattctgatgcagtagtttcaaacacatcagtcatatgtttgacttgtgtttttattctttctggatcgtgagaacgtgcctctgcttctaaaatgacttcatctgcaacaatattcgtagctgaaccgccatgaaacttaccaatattggcagtagttatttcatcaacttgtcctaatttcattcgactaattgctttagccgcaatattaatagcactaacaccctcttttggcgtacttgcatgagctgttttgccaataattttagctgaaattaacatttgcgtcggtgcacctacaaccgtagtaccgacatcagcacttgcatcaatagcataaccaaagtccgcgtccaacaactctgaatttaattctttagcaccaattaaacctgattcttccccaacagtaatcacaaattgaatttgtccatgtgggatttgttgttcctttatcacttgcaaaacttcaagcatcgctgctaatcctgctttatcatctgcacctagaatagtcgtaccatcagagtatatgtagccgtcatcttttacaattggctttacattaattgcgggtacaacagtatccatatggctcgtcaaatataatttaggtacttcgccttcttcgatagtactattcattgtacacactagattattggcacctaatttaggatgtttagccgcttcatcttctttaacatctaaccctaatgctatgaatttttcttttaaaataggttggattgttgattcattccctgtctcagaatcgatttgtacaagttctaaaaacgtattaagtaatctttgctcattaatcataatggaaccccttttatcaaaattttcaagtacgccaaacggtaaaaattgatgaaataaaatgttacagtaattgacgttacacagatttatcaggcttgtaaattgtgtcatattattttcaatttattatatatatttattgtaactcaaactaagctttgtcaaaaatatattgattgatttttcaaagatatcgtataatgaggaaaatgacataagcaaacttactcatgttttttattatattccttaatgatgattgctagttatatcgtctcaagttaaaagttttatatcttatgtcgtaattattaatacaaaggttattcatttggaggcacacaaaatgcaaaataaagttttaagaattatcattatcgttatgcttgtatcagttgtattagcattgttattaacgagtatcattccaattttataaactatatctcaactacctatacaaaatcatacaattaaaaatccatccgttataaacgcatgtattaataagttatcgtattgcaacgattactttcaaacatgggtcatacggatggattattttttaagctacttcactatgcattttcaatgaaccaaattgcgatttgatttgtaaatattcttctaattcatttaatatttgaataatacttgctctcgagttaagcgctttgtgtgttgttggcaatggcagttcatccaatttcaaacgcgtctcatacaaattgtgtaaacgcattgctgtatagtcattactattcacatttagaccaatttctttcagcagtgacgaaacatcatttaaaagtggatctttatgacagatactttcgatgagcggtttcattctcattaacaattccacttgctcttctcgcatatcaaaataatgatagtatgaattttcgtttctaacaaaatgatttttaacatctcggaacgcgatagacttcgcctttttaatatttaaaagtaacacttcaaattcaatcgcaatggtatcttcatatttttcacaaatataactatatttactaaaaatatcagcaatttgttgctcaattttacatttgtattcgtctagttgtttgtctaaacttggcatcattaaattcattgtaaatgcaatgctcagtccaattaacagtaataatgtttcattaacaattaaatgtgcatcaattgattttgcattaaaaacatgaagtaatataacgcaactcgtaatgacaccttcttgtacttttaatacgacagttaatggtataaataacaatacgataataccgagtacaattggactctgacctaataaactaaatattgctgaacctaaaaacaatactaaaaaacatgatactaatcttgaaataatcgcttgtagcgaatgtacttttgtatgtttaatacataatacgactaatatggcgcttgaagcataattatctaaacctaacagcttactaataattacacctaaagtcatacccactgctgtttttattgttctaaatccaatcttgtaaggatttaactttaacatgggttagcgcctcttatctttcttcacaatatttattgaataatgtttgtaattgattaattacgttcatcacatcatgaccttcgatttgatgtctttcaatcatttctgtaatctttccatcttttactaatgcaaatgacggacttgaaggcgcataaccttcgaagtattcacgcgctctttgtgtcgcttctttatcttgtccagcaaatactgtcactagacgatcaggtaatacgtcataatgtaaagcatgtgatgctgctggtcttgcgataccacctgcacaaccacatacagaattgatcataactagtgttgtaccatcttgtttaagaactttgtcaacatcttctgcagtagttaattgctcatatcccgcagattcaatttcattccttgcttgttctacaacaccgttcatgtataaatcgaaattcatgtccataagttcaatcacctatccctttatatttaaactatcctcattctactaattaataacatattgttcaataaactaatctgaatcacaccaatatttagacacaattttaacaatataccaaacattattgtgcttaatatcatggaaactaatttgttcacctgttttcattaatatgtttccagtatgatgtattattttgactttactgcaaaaatgcattcaaccatgttgattattgttctttatctttttttgaatttattgcacatattttattgcccaaaaaaatacatccatcgacaagaacaagataaaacaagttgtcgatagatgtatccatgttatcactaatatatatttgtattttctaaagtatactgttcgatacgctgtttaatatgattcataaatttaccagtttgtaaaccatctaaaatgcgatgatctattgaaatacataaatttaccatacttcgaattgcaatcatatcattaattactactggctttttaacgattgattctacttgtaatatcgctgcttgagggtgatttataatccccattgatgatactgaaccaaatgtaccagtattattaactgtaaatgttccaccttgcatatcttcagttgtcaattgcttattacgcgcttttgttgctaaagtattaatttctctagctatacctttgattgacttttcgtctgcatgcttaatcacaggtacgtataatttattttcatcagcaacagcaattgaaatattaatgtctttatgtaagacaatttcatttccttgccagctactatttaataaaggatatgcttttaaagcatctgctacagcttttacaaagaaagcaaagaacgttagattatatccttctttatttttaaagctgtttttataatgatttctcgtattcacaagatttgtagcatctacttcaatcatcatccatgcatgtggaatctctgttacactattaaccatattttgcgcaattgctttacgcacaccatttactggtattgtgctgttttcactattgtcttcagatgattggttacttgatgtatctactgatgttgattttgtttgaacttgtttgtcagattgagctgtggtaccaccattttcaataactgacattatatccttcttagttacacgaccttcaaatccactacctacaacttgtgataaatcaatgtcatgctctgaagcgagtttaaatacaacaggtgaaaagcgaccattattacgaggttgattttgtttagcagtaaatgtctgttccactgttgcactagcttttttagtagatttctgagtatgctcatccacttttgcttgtatctcttcagttgtttcatttgtcttttcatcagcagtttcaattttacagataattgtatcaatagctactgtctgccccgcttcaactaaaatttctgtaattgttcctgatatcgtggaagggacttcagctgtcactttatctgtaataacttcacataatggttcatattcatcaatatgatcaccaacagaaactaaccattgttcaatggtaccttcatgaacactctcacctaacttaggcattgttatttccatgactttccctccctagaattctgctaattcacgcattttatttaagattttttctggattcatcataatttcattttctaatacaggagaaaatggcatagatggtacatctggagcagctaaacgcatgattggtgcatctaaatcgaacaagcaatgctctgcaataatcgctgacacttctgacataatactaccttctaaattatcttcagttacaagtaaaactttacctgtatttttagcacgatcaataattgtttctttatctaatggataaacagttcgtaaatcaacgacttcaacgttgataccgtctgcagctaaaatatccgctgcttgtaaacaataattgaccattaatccataacaaaatactgttaaatcttcaccttcacgtttaacatctgcttttcctaaaggtacagtgtaatattcttctggcacttcttcctttaagaaacgataagcttttttatgctcaaagtacaatactggatcatttgattcgatagatgataataaaagccctttagcatcatacggtgtggaaggaataacaattgttaaacctggtgatgaagcaaatatactttcaatactttgtgaatgatatagtcctccgtgaacaccgccaccaaatggtgcacgaatcgttaatgggcattgccaatcattatttgaacgataacgcattttcgcagcttcactaataatttgatttgtcgcaggtaaaataaaatctgcaaattgaatttctgcaattggtcttttacctaccatagctgcaccaatggcagttccaacaatatttgactcagctaatggcgtatcgataactctgtcttcaccatattgttgttgtagtccttgagtagtaccaaatacgccaccttttttaccaacatcttcaccaagaataaacacatctttattttgttgtaatgctaagtcttgtgcctggcgtatcgcctctaaataagataatttagccattagttaagactcccttcttcgtacacaaatgcataggcttcttcgacacttggatatggcgcgtcttcagcagcctttgtcgctttattgatgatgtctttatgctccgcttctatttctgccaaccaagcatcatcgataatgccagctgaaagcaactcttttttgaacttttcattgcagtcagcttttttaagcgcttcacgctcttctttcgtacgatattggtcgtcatcatctgatgaatgagctgtcatacgacttgttactgcttcaatcaaagttgaaccttgaccagaaatagctcgatctcttgcttctttcatcgctttatacattgctaatggatcattaccatctacttgttcaccatgtataccgtaaccaagtgctctatccgataatttttcagctgcgtattgtaatgaatcaggtactgaaattgcatatttattatttataatgacacatacaaaaggaagtttgtgtacacccgcgaagtttaaaccttcatggaagtcaccttggtttgagctaccttcaccaacagttgctgttgcaattttcttcttaccatccatttttaaagctaaagcagcaccaacagcatggggtatttgagttgctaccggtgaactttgagacaaaatattcttagctctactactaaagtgtgatggcatttgttttccaccagagttaacatcgtctttctttccaaacgctgataaaaacgtatcatacgctgagatacccatataagtaacgaaagctagatctctataataaggcgctgtaatatcaccttcttctaatgcgtatgccatcccaatctgagttgcttcttgtccttgaccacttacaacaaatggaattttacctgcacggttcaataaccacagtctttcatctatttttctacctaaatccatccatttatatattacttttaggtcttcttcgctaaggcctaatgatttataatcaatcatgttaaatcctcctatttatacgtgaatagctctactttctgctttcaatcctaattccatcaacacttcagagatggaaggatgtgcgtgtgttgttagtcctaattctaatgccgagccattcatgaactgtaacagtgatgcctcattaatcaattctgttacatgtggaccaatcatattaatacccacaatttcttcagttgattgatcaatcaccatttcgctatacccttcgtttgcgtcatggctatcaatcactgctttaccaattgctttaaatggtactttaaaacttttaactttcattccctctgcctttgcttgttcaatgtttaaaccgatagaagcaatttcaggttgtgaataaatacacttaggcatcatgttatagtttactgggattgggttcccctcaaacatatgatcaacagccacaacaccttcttttgatccaacatgtgccaattgtaattttcctatacaatcaccagctgcataaatatgtttatcttcagtttgttgaaattcgttcgttaaaatatgtcctgatgtagaaagttttattttagtgttgtttaaaccaatatctgatgtgttaggttttctaccaatcgatagcaacactttatctactttaattatgtctgaagaaatttcaaacgtaacaccatcttcgttaacatttatatcattttcagaaagttttattccctcatagaatttaacaccacgtgctgacaatgatttttttaatagttgtgaagcttgtttactttcagttggtaaaattctttcacctgcttctataactgttacgtcaacacctaaatctatcatcaatgatgcaaattccattccgataacaccaccaccaataataccaatacttgatggtaacgtctttaatgataatatatcatcgctagataaaattttatcatgatcaaatgataagaatggcaactctgcaggcgaagaaccagttgcaattaatacaaattggttgggtaataagtctgattcaccatcttcatattcgacagaaattgtgccactttgaggtgaaaatatagatgtacctagaatacgtcccgtgccattataaatgtcaatgtgattgtgttgcattaaatgctttacaccttgatacatttgattaataatgtcttcttttcgtgccaacatattttcaaaattaacattagcatctttgacatcaacgccaaacattgctgcctgttttactgtttgaaatacttcagcagatttaagcagcgatttagtaggaatacaacctttatggagacaagtacctcctaatagttgtcgttctactattgccactttcttacctaattgagacgcacgtatcgcagcaacatatcctgcagtacctccaccgagaacgactaaatcatattgtttctctgacatgttcttactcctaactaatgatatatatccattgaaaatttattaatacatagttttcatgtccattaattacctattttacatgattgtctatttagtttgaatgcacataaataaatccataaatgagtattcaacacactttggaaattatctacgtctttgattgtgttgtatcatttctcttgcattttctcgagttaaatcagtaacacttgcacctgaaatcattcgtgcaatttcatctactttatcatcgccaattaactcttgaacttgtgttgttgtacgatcatcttttgatgacttcgaaattaataaatgatggtcgctcatcgatgcaacttgtggcaagtgagaaatacaaataacttgtatatattctgctatatctcgcattttctctgccattttttgtgcggcttgtccagatacacctgagtcaacctcatcgaataaaattgcagtttgacctctcgatttaacaaaaatactttttaacgctaacataattctagaaagttctccacctgatgcaattttatttaaactttttaatggttcccctttatttggactgattaaaaattctacaaattcgattccatcaatattcggttcttctaattttttaaatgaaatctcaagatttgcgtctttcatttgtaagttttgaatttccgatacaatgtggtctcttaactccctagcgactatacgacgctgctttgataacgcttgtccaacctctataacttgattatacaatgcatttatttcttctcgtaactgcgatgtactttgttcatagttttcaattttattgatttcattattaagcttttcttgatatgcgattaattctgaaatatcttttccatatttacgttttaaattattcagcaaattcatacgagattcatactcgtttaacacttgttcgtcgaattctgtattagccatttcatcatataactcatgttttgcatcttctaaaatgtaataaaattgatcaatatcttcttttaatttgtcatatttatttggaactatatcgtttattgttaacaaatggttgcttagttcatacaaacgatcagtgatagcattttcatccgttaatgtcatatgtgcgttattaagcgctaagcttaatttttcagagttttgaatgcgtttaatatctatttcaagttgctctatttcgccttcttttagatgtgcttcagacaattcttctaattggaatttcattaaatctaaacgctgcagcaatgcttggtctgctgattctaaatcttctaactcttgctttttggctttataattttgaaaagtttggtgatatttatccaacaaatcttgataacgtgattctgcgtaattatccaataatgttaaatggtatttttgtttcaacaaagactgcgtttcatgttggccatgaatatctaataattcttgcataacttttcgtaaatcttgtaaagtaactgtttgattattaattttacaaagacttttaccagagctaaaaatttcccgtttaactaataaaaaatcttcatctacatcaatatccatatttttcaatatatgtatagcatctttactctcgtcaatatcaaatataccttcgatgacagcctttttttcaccatgtcttacaaaatcagatgaagctctcattccaattaattgtccaattgcatctataataattgacttacctgaacccgtttcaccacttaaaacagttaaaccatcagaaaattgaatttctaattcttcaataatagcaaattgcttgattgataaggtttgtaacataaactcatcgcatccttataacaaattgaaaattcttgacttgatttcatcacttgcctctttgcttcgacaaataattaaacaagtatcatcaccacaaattgtgcctagtacttcttcccaattgatttggtctaatatagctccaatagattgtgcattaccaggtaatgtttttagaacaagtaaattatcagtaccatctatattaacaaaggaatccattaaataacgtcccaatttttctaaaggatggaattttctatcatttggtaaactataaacatattgacctgaaggtataggtactttaataagttgtagttctttaatatcacgagaaacagttgcttgagtgacatttaaatcataatcgtttaatcgtttaactaattcatcttgtgtctctatctgttcatttgaaataatttctctaatttttatatgcctaaccgattttttgggcacagtaaacacctctgattacgaatatttatacatttattttaacacatgcactgatttacgactactaaacacctttacgtaaaaagggtaaacatggtttatctatcttggttatctatttataaatatttttcatattacgcataacaattgcttaaaatatgtataaaaatgaatatatgtgtaataaacttgctaattattagatttaataagcgtcaattgtttgaacatatttaattaaaatcacattgatgtcacagatacgaatattgtcgtatagaaattgaaaattctattttttaaatgaaagtcttcaacataattttaagtttcaacatgagaaaaatcgattaacaaacaacgtcagttgaatatgccttttgagacatttcaaactttacaattgttgctaatcgatatatttgcttttagtgatccctgctataaaataaatcaacgatttctaataagtgttttgtattgaattgttcatcaatttgcgttagttcatccactgctgcgtctctatgataagtcaatttatcttctgcgccatctttccctaataaactcacgtacgtacttttattattttcaagatcgctgcccacttttttacctaactttgcttcatcaccatagcagtctaataaatcatctttaatctggaacatcatacctaaatgataactataactttctaaatgttctttagttgcatcatcgacattagcgatatctgctgcactcataaccgcaaaagttaataatgctcctgtttttgttttgtgtatcatttccaaagtttcaagatcaattggttggccttcgctttgcatatctaacatttgaccgccgaccattccaacatgaccacttgctattgacagccgttgtagaacttttatttttacttcatcagttaatctatcatcacttgaaataagttcaaatgctttagttaataaagcatcacctgctaatatcgcagtccactcaccatatactttatgatttgttaatttccctcgtcgataatcatcattatccatcgctggtaggtcatcatgaataagtgaatatgtatgaatcatttctagtgcaattgcgctcttcacacctaactcatactcggtatttagtgaatctaaagtgagtaataacagaactggtcggatgcgtttacctccagcatttaatgaatacaacatgctttcttctagctgagtatccattactgatttatttatcgcaaccgataattcattattgacttcatctattaatttattcatcggtagattcgtcattttttacatcctcagcttcttcttttattaagtcattcacctttttttcggcattttttaaagttgtgtcacaagctgctgatagtttcataccacgttgatataaatctaatgattcctctaaagatactgtttcattatctaatttttgaacaatttgctctaattcttgcatcatttcttcaaaactttgcgtttctttagtcattattacaccttactttcgtaacttttgcatctactaagccatctttcattgttaacgtcaattgatcattttctgttaaatctttagtactcgtaatgacttcgtcttttttattaacaattgcatatccacgcaacattgtattagttggacttaaattgtttaagttttctactttatttttcaaatcatttttataacttaatatcttagaattcaataatttaacaagttggtttgtcaattgaagattattttgttgttcttgattaacactacttagtaatgcttttaaattataacgttgttgcaacagcattaatcgatgtctctgttgttcaaaagttgcctgaatttgttgtttcagtctcttttctaaatcatctcgacgttgtatctgttgatcatacaataaagttggttgtttaaacttgtaatacgatgacaaatgttcaacatgtttacgttgttgttctaaatgtttcttgatgaaacgagtcaatgtaaactgatattgctgtatttgttgcagcaattcatattggtctggtgttgcaataacagcagcttgagttggagtcgcagctctgatgtctgcagcaaaatcacttaatgtaaagtctgtttcatgacctactgctgatataatcggtgtcttacaattatatattgcacggacgacagcttcttcgttgaaattccataaatcttctatggatccaccacctcgacctacaataatggtatctacacctaaactatctgcatattcaattttttcaataatgtcgtcttttgctttttcaccttgaaccaaagtactaatttgtatttgttcagctaatggaaaacgactatttatcgttgaatggatatctcgaattgcggcacctgtactcgctgttaaaactgcaatttttttaggaaacttaggtattgatttcttattcgctttatcaaaacaaccttcttcagttaattttttctttaatgcttctaatttttgatataagttccctataccatctaattgcattttatttacataaatttgatagtttccacgacgttcaaaaacagaaacacgtgcttctaataagacttcatctccttctttaggttcgaagtttaatttagaagcactacctttgaacatcatggcacttataacgctctctttatctttcacattaaagtataaatgaccacttgaatgctttttgaaatttgaaagctcacctttaatcaatacagattggagatgtggatcttgatcaaatttatatttaatatatttcgttaaagctgaaacacttaaataatctgacatataacatcactcaattttatttttttatattactcaatacaccatttataaatttataatgatcatcatcactgaattgttttgttaattcaactgcttcattcattacgactttagcaggtgtatcactgtgtaatatttcatatgttgccattcttaaaataatacgatccgtttttaataaacgtgcaatagtccaatcttttaaataaggactaattgtctcgtctaatacaggttcgtgatctttaacgccagaaactagccaatgaataaattcaaagtctaaatctggattatcgtctttaataaaacttatcgcttcatttatcgttaaatcactgtccttcatttctaattgaaataaagtttgaaaagcttgcactcgggattctttacgactcatttttaactccttcaaacgtttgtatttttctttatttaattactgaattaggtatgacattacttttcaataacgatttgtgtaatgtgaatattaatttgcttaggttctatcgctgtcatattagaaattgaattaaaaattgacgtttgaattttgtttgcagtttttgaaatattaacaccatgttttaatgcacaatatacatctatatatatgccatcttctttactctcgatttttaaatcacggcttaaatttttacgactaactttttctaaatttgtttcttttaattcagcaaaatggccagtgatgccttcgacttccgaagtagctatacttgcaataacagatagcacttctggcgctatttctactttacctaattttgaatttgaataatcagttactttgaccatggattgacctcctattaaccttcatcattcataatgctattttgctctaaaaagtttgtattaaatttaccgcttctaaatatatcgttattcaataatttaatatggaatggaatagttgtatcaataccaagaaccacaaattcacttaatgcacgaatgccagccataatcgcttcatctcgtgtcggttcatgtatgattaatttcgctaccatcgaatcataatatggcggtatcgtataattagtataacatgctgactctattcgaacaccatatccacctggtgcaagatattgctcaattttacctggtgatggcataaagttcttgtaaggattttcagcattaattctaaattcaattgcgtgtcctgttaatttaatatcttcttgtttatacggtaacacgtcacccatagcaacttgtaattgtaatttaactaaatcaattcctgttaccatttcagttacaggatgttctacttgaatacgtgtattcatttccataaaataaaatttattatcatttaaatcatatataaactcaattgttcccgcattttcataatttacagctttcgctgcacgaactgcggcatttcccatttcacgacgtgtttcatcatctaaaattggggaaggtgcttcttccactaatttctgcatacgtctttgaattgtacaatcacgttctcctaaatgaattacattaccatagctgtccccaacaatttggatttcaatatggcggaagttttcgatgaatttctccatataaagtccaccattaccaaatgcagtttgagcttcttgttctgtcattcggaagccagtttcaagttctttttcatcacgagcaacacggataccttttccgccaccaccagcagtagctttaatgatgaccggatagccaattttcttagcgattttcttagcttctgagacgtctttcattaaaccgtcactaccaggaacaactggaacattggctttgatcatttctgccttagcaacatctttgatacccattttttggatagattgataacttggtccaatgaacttcaattggcatgcttcgcataattctgcaaagtcagcattttcagctaaaaagccataacccggatgaacgccatcacaacctgtagaagttgcaatagataagatgttcggaatatttaaatatgaatctttagacaaagtgggacctacgcaatatgcttcatcagcaatttgagtatgtagcgcatctttatccccttcagaatagattgcaacagtttggatgcctaaatcacgacaagcgcgaataatcctaactgcgatttcaccgcggtttgcaattaaaacctttttcattatttcaccttaaataacggttggccatactctaccatttgtccgtcttctactaagatttcaacaatttcacctgaaatttctgcttgaatttcattaaatagtttcattgcctctaaaatacacactgttgtttcatttgaaacagtgtccccaacttgcacatatgcttcttcgtctggagatggcgatttgtaaaatgtacctaccataggtgcattaattgttttgtgattatctgaagttggctttggagcttcagttttattgctatcagttgattgtgcttgaggcataggcattgccgcagcttcaactggcatttgtgagatttgtggcgtgataatctcagtttctttttctttcttaagcgtcactttgcctttagtatcttcaatattgatttccgttaaagttgatttatccagaatttcaattaattctttgatttctttaaagttcattattactgactccttcagtttgttttcatctacccgtctattttacttgagacaactcttcaattcaagcatgttcatattgctggcgacattataagtctatcccaaagttataataaaaccacattttaaattaaaaacacttgtgtatttattacttaacattgactcatcttaactcttgattaaaaattttatgcattcagttaaacatatcaatgttatttttattagctattatgttttatcctcaacaatatgatatgtagatatatacctttactcatgtctatgttttttcactaccaattagacgattcgttttatattttaaaaattattttaaaaataaaaagcctcatatcagcatataacctataatcattttaggcaatagctttatgagacttatttagaatatcttacgttaaatcagtatagtgaatacaagctatttgttaacaaattagagattatcctcttgaaatgtagcttccatcaccagtgttgataattaaaacgtcaccttcgtttacaaataaaggtacatttaatgtataaccagtttcaacagttgccgatttagtggcaccagttgcagtatcacctttaataccaggttctgtttcagttactgttaattcaacagttttaggtaattcaacaccgatagtttcaccttcgtatgtttgaatttgtacttccataccttcttttaagtaattcaattcttcttttaagtaatcacttgaaagttctgtttgttcaaagctttcattatccataaatacatgattatctccgtcagcatataaatattgcatgcgacgattttcaatcattgctggttcaactttttcaccagctctaaacgttttctcttgaattgcaccagttcttaaattacgtaattttgaacgaacgaatgctgaacctttaccaggctttacatgttggaagtctataactttccaaatagcgttatcaacagaaattgttaaacctgttttaaaatcattaaccgaaatcattcagtttcctcctcattttacacgcttatgttaaaactataaggtcttttgtgcatttagtaaagacttgacaaccattttctgtaattaaaatatcatcttctattcttataccgcccaaaccttctatataaacaccaggttctactgtaacacagttgttaacttgaagtttatcttgtatcgtacgagccagcattggcccttcatggatttctaaaccaataccatgtcctagtgaatgtccaaattcttttccatacccttttgactctaaatagtttcttgaaatggcatcagcttctgcaccagtcatgccaggtctaatctcattaattgctttcatttgagattcaagtactatttgatatatttctttcagtttaggatctggttctccaatagcaaatgttctagtaatatctgaacaatagccgttataatacgcgccaaaatctaatgtaatcatgtcgcctttttcaataattttatcacttgcaacaccatgtggtaatgcacctctatgaccagatgctacaatcgtatcaaatgatggtccatctgctcctaattctagcattttactttctaatattgcctttaattctttttcagtcatacctgcttttacaacagttaaaatatattcatatgtttcatcaacaatattagctgctttttgaattaaagcaatttcgtcaacatctttgacgtctctaattttatctacagtattagaaatgcttattaatgatatacggcttttatttaattcaaggtatgtatcataacttacatgatgctcctcaaaacctatattttcaaaattttcttggtgtagcaattctttaatctcaccaataatagtagatttacgattaataatttcataatttggcgcctgcttagttgcttgatcaatatatctaaagtctgttatcaaatattgtttatctttagatatgataagtgctccactggtaccagtaaaacctgataaatatcttctattgtaatccgaaagaatgataatcgcatctaaatgtttttgttctaaaatacgatgcacttgtgttattctgctcatcttattacctcctagtgaaacgtttgtgcatttcaactttatacattaaaataatatcataataaggataaaaaataatagatattgattttagggagatagtaatgaaaaaattggtttcaattgttggcgcaacattattgttagctggatgtggatcacaaaatttagcaccattagaagaaaaaacaacagatttaagagaagataatcatcaactcaaactagatattcaagaacttaatcaacaaattagtgattctaaatctaaaattaaagggcttgaaaaggataaagaaaacagtaaaaaaactgcatctaataatacgaaaattaaattgatgaatgttacatcaacatactacgacaaagttgctaaagctttgaaatcctataacgatattgagaaagatgtaagtaaaaacaaaggcgataagaatgttcaatcgaaattaaatcaaatttctaatgatattcaaagtgctcacacttcatacaaagatgctatcgatggtttatcacttagtgatgatgataaaaaaacgtctaaaaatatcgataaattaaactctgatttgaatcatgcatttgatgatattaaaaatggctatcaaaataaagataaaaaacaacttacaaaaggacaacaagcgttgtcaaaattaaacttaaatgcaaaatcatgataggagtcttttaatgcgtaatataatattttatcttgtacttattattgctgcgattggattagtaatgaatctagatgcctttattttttcaatcgtcagaatgttaatcagctttgctgtaatagctggtattatttatctgatttattatttcttcatcttaactgaagaccaacgcaaatatcgcaaagcaatgcgtaagtataaaagaaatcaaagaagaaaatagataaaaaaacggaagcacttgtaggtaaaatagtctacgtgcttccattttttattctaaaaactactttctaaacatccattcatctgaacgatatttttcagttaattcttccacttctgccaattgagcttctgttaattcaagtggctttaattctatatttaaacctttcttaaaacctttctcgaaagcttcttccatttgactaatagtaatgtgttcatctgaaatatcattgatggcaactgctttttcaacgaatgcctctttcatttttaattttaatctttcatttttataaataaacatatcaaacagttcatcaatatcaatatcttgtaaaatcgaaccgtgttggaggattacgcccttttgtctcgtttgagcactcccagcaatcttacggccttcaacaactagctcataccaacttggtgcatcaaaacacactgaacttcgaggttgttttaatttttgacgctcttcaggcgttttaggtaccgcaaaataagtatcaaatcctaagtttttaaatccttctaataatccttgtgaaatcactctgtacgcttctgtaactgtagaaggcatattcggatgcgattcaggcacaatcacactgtaagttaactctttatcatgtagcaccccacggccaccagtttgacgccttacgagaccaaaacctttctctttaaccttatcaatatcaatttctttttgtagcctttggaaataccctattgataatgttgcaggattccatgtgtaaaaacgtataactggatcaatttcacctctagagacaaaatttaataacgcttcatccattgccatattataatatgggtctttacttcctgtattaataaaattccaagtttcagtcatattcaagaactcctatcagcaaaatgtataatatttgattcgctaattaatcaatttaactaaatgaataataattgcaattctttagtgaaatattttgataatttgacctaacagtcttataattatattatcgtttaattagggaggatgcaagatgagtgctagtttgtacatcgcaataattttagttatagcaattattgcttatatgattgttcaacaaattcttaacaagcgagctgttaaagaattagatcaaaatgaattccataatgggattagaaaagctcaagtcatcgatgttagagagaaagttgactatgactacggtcacattaatgggtctcgcaatattcctatgacaatgttcaggcaacgattccaaggattaagaaaagatcaaccggtatacttatgtgatgccaatgggattgctagctatagagccgctcgtattttgaaaaagaatggatatacagatatctatatgttaaaaggcggctataaaaaatggactggaaaaataaagtctaaaaaatagtttttgtaaatttaatatacgatttaataaaatctgagtgttaattgatcatcaataacaatactcagattttaattttttaacaaagcctgttactatatttctctagcttcactgatcattaaacttagtttcagcataataaagaaagttcagctcattttcaatacgattcaattaccgcaatctaaaaaatgaaaagacaatttctatgaaagaataataccaaaccctaagagttattacttcggtttatttttcttgttcaaatagaaattgtctttttcaattgattttgaaaccattatccttaaatcttcatacaaagttagaataataattctcggaatatgtgtttaatactttatttttcctgtttaagattttcaaactttaatattggtttacgagcagctgtagcttcgtctaatcgatcaatcacagttgtatgtggtgcttctagcactttatcaggatcatttttagcttcttcagcaatactaattaatgtatcgataaaataatcaagtgtttctttagactctgtctcagtcggttcaatcatcataccttcttcaacatttaatgggaagtatattgttggtggatgtacaccgaaatctaataatcgcttagccatgtctaaagtacgtacaccaaattctttttgacgcacaccacttaacacaaactcatgtttacaatattgtttataaggtatttcaaagtgttcagataaacgtgctttaatataattcgcattaagaaccgctgcttccgaaacctctttaagtccagttgctcccatagttcgaatatacgtataagctcttaagtaaataccaaagttaccataaaatggttttacacgtccgatagaatttttaatgtcattatcatatttaaatttgtcgccatctttaataaccattggctttggtaagtaacttgctagttcttttactacaccgactggacctgaaccaggaccgccgccaccatgtggaccagtaaatgttttatgcaagtttaaatgaacagcatcaaatcccatatctcctgggcgaactttgtccataatagcgtttaaattcgcaccatcataatataatagaccaccagcattatggacgatttcacggatttccataatgtttttttcgaaaatacctaaagtatttggattagttaacataatagctgctgtattttcatttacaacacgtttcaagtcatcaatatcaacttcgccacgttcgtttgattttacagtaactgatttaaatcctgcaaatgaagctgaggctggattcgtaccatgcgcagaatctggcacaatgacttcatcacgatgaccttcaccattattctcatgataagctttaaatatcatcaatgcagtccattcaccatgtgcaccagcagctggttgtaatgttacctcatccataccagtaatttcttttaattcttcttgcaaactataaataatttctaatgaaccttgaacttggtcttcatcttgtaatggatgtgattcactgaatcctggtattctagcaaccttttcattaattttaggattatacttcatcgtacatgaacccaatggataaaatccgttgtctacaccgaaatttttatttgaaagttcagtataatgacgtactaagtctagttcagcaacttcaggaaactccgctttgtttttacgaataaatttatcatctaacaatgactcaacagaatttgttttaatatcactttttggtaatgaatatgcatatctgccttcacgagatctttcaaaaattaatggacttgatttactagtcatttaactcaccagccttttctacaaatgtatcgatttcatcttttgttcttaattcagttacagctattaacatgtgatttttaaagtcgtctgaaacaacacctaaatcaaaaccaccgataatattgtacttcactaattcctcgttaacttgttgaattggtttgtcaaatttgactacaaactcattgaaagatgtaccatctaatacttcaaaaccttttttaataaattgttgtttagcatagttagcatgttctatattttgaactgcaatatcatagataccttgtttaccaagtgctgacattgcaattgatgacgctaaagcatttaatgcttggttagaacaaatattagatgtcgctttatcgcgtcgaatatgttgttcacgtgcttgtaatgttaatacaaagccacgattaccttcatcatcttgtgtttgaccgactaatctacctggcactttacgcattaactttttcgtcgttgcaaaatatccacaatgtggcccaccgaattgagcaggaattccgaatggctgagtatcacctacaacaatatctgcaccaaatgaacctggaggtgtaagtaatcccaatgctaatggatttgcatatacgataaataatgcttttttatcttcaataaagctttgaatcttttcaagatcttcaattgaaccgtaaaagtttggatattgtactgcaacagctgctgtttcatcatccactgctgcttctaattttttcaaatctgtaacagtgccatctaaatcgatttccactacttcgaattccttacgcgtcttagcataagtatgaagtacttgtaatgcttgataatgtaaaccttttgagactacaattttatttttctttgtttgactaaatgctaagatacatgcttcagcaaagctagtcatcccatcatacatagaagaatttgctacatccatatctgttaattcacaaattaaagtttggaactcaaaaatggcttgtaattcaccttgagaaatttccggttgatatggcgtatatgctgtgtaaaattctgatcttgaaatcatagcatccacaactgatggcgcgtaatgatcataaacaccagcacccaaaaatgatgtatgcgtttctttagtgatattcttgcttgcaatgcgatttaatcttctaagtaacgttgtttccgcttcgccttcagcaatatttaaatctctatttaataaaatgtcacttggtacatcaccgaataattctcctatagattttgcaccaattgtttgtaacatttcttgcttgtctttttcagttaaaggtatataacgatgactcacaatgcacacccctttttaattatttatcaatttgatttttcttaacaattttcgcttttaattgacgcttacgaacttgaacaagcaactctctacccatttcaaactcatctctttttatcattgcaagtgcaattgattttcctgatgatggagactgtgttcctgaagttacttctccaataatatttccatctaaatccataacttcataaccagttcttgcaattcctttttcaagtaattctaatcccactgttcttcttggtgcaccattttctttttgatcttttaatacagatttaccaataaaatcagcatcaattaatggtttacttgcaaaagcgataccaccttcatatggtgtaattgattcagttaaatcttgtccatgtaatggcaatccagcctctaatcttaatgtatcacgagcgcctaacccacatggcataacattatactctaataaaccatcccaaattttttcagtatcatcgatattacaataaatttcaaacccatcttcacctgtgtaacctgactgagataaaatgacgtttgctccaaataatttgacaccctgtttaaattcaaacattttcatttcagttacatcttcatcaactaattgattaattaaatctctagcttttggtccttgtattgctaattgaccatattggtttgatacattttgtacttcaacatcaaatttctctttgtgttttaaaatccaattaaaatctttttcagtattagcagcattaacaactaataaataattgtcgtcagctaatttatatattactaaatcatcaataataccgccttcttcattacataaagcagtatataatgcttttgaagtagttaaattatcagtatcatttgataataaatattgcacaaactgactagcatctttacctgttacttcaatttcacccatatgactaacatcaaacaggccaatttcgtatcgaacagcattatgctcctctttaatacttgaaaattgaacaggcatcgcccatcctccgaattccacaatttttgcacctctatcaacataattttgatataaaggtgtttgttttaaatcacttgacattgaaatacccccttaaaattataaaaacaggatagcaatcgctaccctgtttataaatcaccaattcaggaacgcgttacagtattatccttttgcctgagagtttcgtaataaattacttgcaccttcggcgatagagtcttaacgctctattctctctaatactgatcactcgcttttattaaatttagcaattcataatatatttctgaaattgatagcaaatgactatcaaatttcttgaatgcgatttcattatatcttaaaatccgcgagcaatacaagtcatttaactgcttgattgtcttattatttgcattaggtcgatgtgggtcatcattgattcgactatatataatatcaatattacaatctaaccaaataatgtttttttgatttttcaaaaaattaaatgcctcttcactttcaataataccaccaccagtagcaattatatctgcagtgttaatacattcttgcaaacatgtgaactctaaatttctgaaatattgttcaccatgtttactaaatatttctggtattgttaacttatacttctcttcgatatatgaatctatatcaataaatgataaattttgctcatctgcaacgtatttaccaatcgtagatttaccggtacccatgaaaccaattaaaattattggtgatttatcatgattcatgcgtttccccttctttcaataacaaaacaatcttatagttatagtcagtttcaatattatataatgtctttaattttaaactatattgactgatataaaaagtgaaaatggaaaaataaattgctgttagcatcaataagaacggagttacatatcctttttctttatataaatcaaaattaataaattatttcacatcctttttaatagtactcatttaaattctagtaagttatacataaatagttttagtctgcagatttgtaccgactttaactgttatcgttattttaataatagatttatagtagatatttgcagtaaatgctgtaacattattaatcattgttatatttcctctgtcatttacaactttaataattttattatttattaatttgtattcgatcatttcttcacctttatgtaaaatgatacgctgttgcctaatttcaatatcgtttttatctacacctttaaaatcctctagaatatctcttgagaaaaattcgaaatctacagttgttaattccctactttcaattagaaaagttttgctaagtctaattaagtctggaacaattagtaaaattatacttataaccatcatcgctactaacatttcaataagcgaaaaagctttgacattaatactgtatacatgtcttttgataagaagtggtattttttgaaatagcacaaatttgttggtcactttgcttaatatcatatttccctatagttacccccttcttaagttcttctttattaattttagatacagtcgtcaaaattactttagaagcatcaattgattgtagtttatggtttatactcgcttgcatttgattcatcattggtatcaatagtaatgtaatcaatccaattagcaaaaatccagccatactatctattaagaatgatcctttacacttatagcttttcataacgaattcttcctttttcaatatggaatattattctataaattgaattgttattgtcaattgttatgctaccaaatttattgatattcccttttttatcaaaggcaataatatcaacttttgcaacattaattattttgcctacttttaattttagaaatcgtattttattattctctattactttaatagtgtcactgttttcataaaatctaacattgatatatccttgatttgctatagcttgcgacttaatataattcaattcagtaataaaagaaatgatatttgcctcatcatctattactctaagattgcttaatcctttagatgtcattgtcaaaagtagaaatatactgattaacatcattaccacaagcatctcaatcatagtaaatgctgactgctttctaatttgcaactgcttctccattactaattgttattgtctctcctgatttacatgtcttttgtgcttcttttataaaaccatctgcaattaagtcttcaatagacgatggatttctattatgtttcaatgcatacgcttcaatttgactattaaccatttttacctgtgcattacaacctgttgattgtatgtgagcagtttgtttagcaatatttggaatgattaaaattaataataaactgatgattaataacactaatagcatctctatcaatgtaaacgcttgagttttcttaagaaatttaaacatatattaacctccattattttatactttgcatcatttgaaacattggtaacataattactaaataaattgcgacaataaataaacctaaaatcaaaaataaaataggctgtaaaaactgagtctgttttatcgctttatcttctatttgttttactaatatttgcgaatataactttagttctacttctagcttccctctcttttcaccttgtagcacaaacttaattaattgaggcttaaagcattttagtttttctaaaatttgaggcaaaccatatcccatttctgaataagttaataagtatttacctagaaactgtctaaatggatcactactatggttaatataaacgtctactattgattgaagtgtaataccatttttataaaacaacactaattcattagttacaaaataagttttaaataattggaaatagcctgatattagcggtagtttcatcacaaagtttatcttattgagcatatttaaattgttataaattaatttcataataatagccaacatagatactattatgagcattactacaattatagtaggtaagctggtaatgaaaaaagacaatgttttttgaaaagaagatagttgaatattcatagaagtatataattgttgaaactgtggaattactgtgaggtttaatataataatcatagcaataaagatagaaactagtattaaggggtattgcagtgtctttaacaatcgttgttctgactttctattcactttcatataatttacggtttcttctagaacgtctataatattgccaaatctttctgccaaatatacttgcatgacgatagtatcgctataacctatcagtgataatatttgattgcatggtgcaccatttgaaatttcacttagaatggtggtacctaattgcttatttttatatgtcatttgaagatttaaaaattgaaaactttgatacagagtgaaaccatatttcaacaaattacataaatttgaaagtaaatcgatttgttgggccttacttaattgtcgcttcttagaatgtagtttaaatgtatttatccattgtagtttcacaaatgacacctgcttttgtcatatcatcaagtttatcttctaagttcttaaatgatgatggtaatgaatgattatgggaaaagaaatatcggagttgttgctgagatagaatttcgcatactaattgtcgctgttgcttaatagtagttacaagtcgttggtttataattaagttagttgcctgtatcaattcttgtacagaaatgcccatttctaatagccttaaaatagcacctttacaatcagttgcatgcaatgtagtcagaacaaggtgaccacttaaactagcctgtataacacacttggcaacatctttatctctgatttcacctattaaaataacatcaggatcacatcttaaaatagctttaaacgaatttacatagttaatgccagctttatcattcacattaatttggacgataccaggaatttgcatctctacaggatcctctatagaaattacatttaaattcaaggctttattcgcgtatgagaccatttgatacattaatgtactctttcctgaaccagttggcccactaaacaatagtaatccttgtttcttattcatgaggtgtttaaaatcattgaatttataagttgatttctgttgttgaaaaaattgaggtacaattctgataacacaactttcttggccaagtgacaatggtaaagttgatattctcaaaaaatatattttattgaaatggtaactatatcgaccgctctgtgcgacttgctgtgtagaaacatcaagcccagcttgaaacttcatataaactaataacttttgataaatgctattcccaatttgttcatactgctccaagttatcattaattctaaatttaatacttacttcatttttaactggaataaaatgtacatcactcgctttcatttctatcgctttattaattatttcttgaaatagaatcttcaaaaaaacacctcctacatataatcacgtaggaggtgtttttattacttcaatttaaccgtgtaaaaatggatttaattgttcatcatcaaccgtcgtatatggaccatgtccagggaataaaggtaaatcgccttctaattcaaatattttatcttgaatagaatcaactagcgtttcataatcacctttatataaatctgtacgtccgattccattattaaataatgtatctccaacaactgcgaattcatcgaacacatatgttaaacttcctggtgaatgtccaggtgtgtgtaacacattaaacttaaatccttctatttctgtgctaccttcgtttaacttttcaggagttaccttacttgtaataattggtaatccatattgcttaaatttatctgctccatttttaacgggatcttttagaaaatcaaactctgcttcatgcatataaaccgggacatcgaatcgatcaactatatcatcgactgctccgatatgatcaaagtgtgcatgtgttaataaaatagcttttaacggtttatttatttggtttaattttttaataattttttcactttcacctgaagggtcaatcagaataacagctttgtcattttcgatgaaatacgtattagtatcaactaagcctaaagttaagcttgaaatcctcataggttttcaccactattttctaaatgtttttgtactgatgttagtttatcattcatttttctagatttgtctcgtcggtcatcaatacggatatttgtacaaactctacttaaacctttatcaaaaggtaattcatgtatcacttgcacaacttctaatacatcgcttaattcaccttcaattagagtattcattggtgttaattgaaaatcaattttacccattgctttatattcttgaagttttttctgaatatctgcaatatatttactaacactcggaccttccgttccaactggaataacaaccacatcaacaatagccattattttaccccctctttatctaatacataggtcttgattaatcctgctgctcctgtaatacctgcatcattacctaatttcgcttgtacaatttcagtttcaaattgagcaggtgcaaatgttaaattatgatattctgttttaatattttcaattaaaataggtcctgcagtagacattcctccacctagaacgatatatttcggattacttgtaacactaataatactacataaatatccaatatagtttgcaaccttttcagtaatgaaaatacagaattggtcaccagcttttgccgcatcaaaaacagcttttgctgtaaccttattttctttaatcaattctaatatagaagatctaaacgtcaacttcggatagtagaagttaattaagttaacaacgcctgtcgctgaagcaactgtttcaatacatccagaacgaccacaattacatttaaatcgttgatcgaagtctgctctaaaatgacctatttctgcgccagagccattatgaccatgtacgatttcaccatttgaaataattcctccacctagacctgtaccaagtgtgatggcaacaacatcatcggcaccttcaccagcacctttgtgtttctcccctaaagcagctatgttagcatcattatctacatacactggacaatcaacgaattgttcaaaaatctcacgtacattaactttttctggccaatataagtttactgctccatttactgtacctttttcaaagtcaacaggacctggtacaccaatacctacgccaagtacatttgaaaaattataattattttcatttactttttcaacaaacgaatcataaattcctttcaaaagtgtatatcctgtactatcagatgtatcagtgtgaatagaccatttatgtaattgttctaattcaggtgtgaaaatacctaatttacaagtcgtcccgcctacatcagctgctaaaataatttttgtcatttctgttcattccttctctgattaattatcaacgtacatttcaaatattcttccttagataacagttcatattgatacaatgatgaaatctcctgttgaatcatttcgtacatatcttctggatttttaaaatatattagaaatccgtaacttttcaataactgttgtacatcataaaagttatttatttttcgactcatttgatttagtcaactctttttctaagttaatataatctgtatttttagggtctgcatttaatgctttacgcacatattttaatgctttttcatcatcatttaatgaacgatttgctatcgctaactcaaaatttaataaacctgatttaggaaacattctaagtcctcgctcccattctgtcataccttcggacttagaattgatagtagccataatcataccacttaaataatatgtttgatcatcggcataatttttatttattgtctgcttcacaatattttgagcattatcataattaccactagtcatatcatctttgatcaatttattataaatattatcttctttaattgtaaaaattctaatttgaagtgcaataaatataacaagcataccaattagtaaaatccaaaaaatattacgattcactttatagtaatagccaattaaagttattaataaaccaccaatgaatcctccaatatgcgccacaatatttatatttgacataaacagagaaacaccaactaatatcactaatgcaattaataactgtcctaacatttttttgttaaatgtttttgaaacatacatcatcgcaaaaattgatccaatcagaccaaatatagcaccactagccccaactgaaattgtagtcgtattaaatgatagtgatacaaagtttccaaacaaccctgcaataaagtatacagttaacatccgccatgaaccaataattgcttcgactattttaccaaaaataaataatgaaagcatattcataagtatatgttcaaaactaaaatgtaaaaacatcgatgtaacaattcgataccattcaccatgtacgacattaaaatgcactaacccgccaacatctaataattttacatccgaaaaattatttaaatataaaatcatacataaccatattaagacatttacaaatattattgtgtatgttgccggtgaaaatttctgcatatatttatctaaaaagttatcggttaatactttgcgtttatagaacatatatgtctttttatcattatcttctgaaataagtctagccaaaaatatattcggcatatgctttatcaaatcttttgtgtgtcttataacattgaatttaattctaattggcgaaacttcatttaattgttcttctgaaaattccgattctgtaaaataataaaattcaaaactttgtggttcgaaagaaataaaatttgctatttcatctttgtgttcaagcactttcgctttgtcaaaacgtatttcttgggtagacttgatatgttgtttaaaaatgactacttgtttttttcttttatgggctaaccaaatttcttggtcatctttttccctattgacaatatcaaaattcaagtacctaatccaataatatattgttttccaaaattgtttgtctatgttcatttagtcctccactatgctgattgatatataatcaatttatcgactggttgatcgaatgattccggttcaaatgatgttatttgaaaatcgtataataagcttattgtctttgtctgataattagctaaaaacctgtcgtaatagccaccaccatacccaattctatatccatcgtcttgaaatccaacaccaggaacaacaattaaatctaggttattcgttgtttcaccttttgaagttggatagtaaatccccttattatcgacatcaatatctttgagattaaatatttctttaaaagtcatttgatgatttaaataatccattttcggtacaaaaatacgtttatgatccattaaggcttgttcaataatagaaaaagtatctacttcatgattaaaagaaagaactagcgcaattgcgtttgcttctttgtattcttcagttgcaaaaaattgatttcttaaccatgtgtctgcttttcgcttttcagctttattaaaattcttcattttatgtaaaatgtattttctaatctcatttttagtcacattatcacccactttattcaattctattatatcgttaataacaatacatgtcattatgttgtcatgatgaattatgcgacaattctaaaatttattatttcaattgaaaatcttttatcatttcatacgtgtgcataattaaaaaggtgaaacctcttattttgagatttcaccttttttattgttaatttaaatttaattttaatgattattttgtttcacggtgtaaagtttgtttgttttcacgtgaacagaatttcttcatttcaacacgttctggattatttcttttgttcttagttgtaatgtagtttctgtcaccacattccgtacaagctaaagttacgtttacgcgcatggttattcctccttatcatttctaaatacgactttattattataccaacatctataatatttgcaaagttaaaattttacaaccatgcgctacacaatcgtcaggttaaattttatttgtctttgtctttatttttatcatctttacctaactgcttaaagtagtagttaattacatctctacctaagtctccacctgttaaccatggtggtggtacaggctgatttgtatatacaattgaaaacgctaattttggatcatcaattggcgcgtatcctatataagtagagttaactcttggctctccgttttggaacacttcagcggtacccgttttaccagcagtaggtactactgtatctttaaaactaacatatccagtaccatctttatcattaaatgccattttgaatccttcttgaatttgtttgatttccttttcagtattattaaccttgttcaagacagtgccattaattttcttcttgagtggaccaacctcatctttattagttgattcatgaatcgttaatccaatgtgtggctgtattctataaccatcattcgctatagttgaaacatattgtgataattgtaatggtgtataggtatcatattgaccaattgataaatctagataattacctggattatttgttaatggttcgatttgacctcttgtttcatttggtaaatctatccctgttttcacacctaagcctacttgatttaatcctcttctaagcttttgggcaggtgaacttatatctgaaggtaaagccataccagaataataagggtctcccgctaattttaatgctgttttaaacatatatacgtttgatgaatgcatcaaagcttgcttatcattaatagatacatgcccgtttttattgaagtatgatcgttttgtcaaaccaccttggaaatgtaatggttcatcgaccattgtttctccaactttgatagctttattctgataaccagctaataatgttccaccttttacagaagatccaaccgcaaattgagaagtaaacgtaccaatgtcataatcagtcattttaccactcttattaatctgctttccggcaagcgcaagaatgtctccatttttaggattttgtacaaccatcatagcattatccatatcttttgcaccttggctgcgaagcttcttaatttgtttatctaataatgcttctacttctttttgaagatctatatcgatcgttaatttcaaatcttgaccgcgagcgccaggatttaacacttctgaagatgtaactttaccagatttgtccgttgtgtatttcatttctttcttcttaccacgcaatacatcttcatattgatattctaggtaagattttccaacacgatcattgcgtgaatatcctttggataagtaatgttctgtcaattcttttggaataccttcagcaggtgtcgatacatctccgaatatacctcttaaagtatcgccatatggatattttctatcccaatccatagacgtgttaacacctggtaatttggaaagttgctgagaaactgctgcatactctttttcactgacatcttcattttttatcatttgtggatctaaaactgttcctgcattcatctctcgaaaaatagctaaaacttgtaaatctttagaagacaattcatctaattgtgattttccgattttcgataacagttgtttatcatattgatcttgtttaatacttccatctgctaacatagcttgttcttttgtcatcattgcttttgcttttttaggatgcaactgaatccagaaatctttcttatcacgttctgtaattttcttagtatccatcttgattagctttgataacttttcagccgtatccaacatttccgattgtgttgtttttcgacccctagtatatgtaatagccattttagaagcattatcaactaaaactttcccatttctgtctaaaatacgacctcttggcacagactcattcactgtaatgttttcatcattttttataatttgtttataatgtgagccttgtgcgatttgtaaataacctaaacgtagtactagtactgcaaaaataaatacaatcacaccaaatataaagttaattctcttgttaattgtattttgaacgatttcatcatttgatttttcttttagtctttttaacaaaactacctacctctattcaaagtctttcactttaaatcatatatgaatttagaaattatttctatctttttgacaaaaaaataacggtctcatttaagagaccgaacaagtaatcatactttattttgttgcattatataattcgtcaactttttcccagttaactacattccaaaatgcgccaatgtagtcagggcgtttgttttgatattttaggtaataagcgtgttcccatacgtctaaacctaaaataggtgttttaccctcagttaatggattatcttggtttggtgtagtcacaatttctaactggccattgtttacgactaaccaagcccaacctgaaccaaagcgtgcagctgctttgtcagcaaattcttttttaaattcttctaaagaaccccattgttctttaattttttctactacagtacctttttcttctgagtttggtgaaagtaactcccagaataatgaatggtttaaatgtccaccgccattattacgtacagcagtttggatgttagctggtacactgtctaaattagcaacaatttcttcaatagatttagattctaaatctgtaccttctactgcagcatttaatttcgtaacatacgtgttatgatgtctgtcatggtgaatttccatagtttctttgtcaaaatgtggttctaatgcatcaaatgcgtatggtaattttggtaattcaaaagccataaataatcatcctcctaaaatgtctgtaagtaaataataacaagcagtgactggttcaacaaagaatttgcttaaattctactacttattattttctctactcatttaatataactcaaatcaaaaataattaaacattttgtatataaaaagttaacagatttgccataaaatcatacgaacggagtatgaaatgaacctttatcttctataatttaaaaaatgagatttatgcatacatctgaccaaatgtgcataaatctcatttctttatattaatcttggcaagactcacatacaccataaacttcaagtttgtgtttgtgaatattaacaccaggtagtgataactttatctgatctattggacaataatctattacctttgtatctccacacttttcacagataaaatgatgatgatgatggtttgtacaagcgattctaaacttcatttcaccatcaagttctgtattttcaataatccctaaatctttaaataagtgcaggtttctatatattgtgtcgaatgaaattccaggataattttcatccataacttgttgtatatactttgcgtttatatacttatcttcttcgacaaaaatatctaacatatctttacgtttatctgtatattttaaaccgttctcttttaaaattttaatagcatcatttgtattcattgatattagctccctttttaaacttcattcgcattttctgataagccattgtaatcataagtaaaataactagtagaactacaattacaccacccggagaaatgtccatatagaaagctaggactaagcctaatattactgataattcacctaaaaatacacttagtaatatcaattgcttaaaactttttgttattcgcatacttattgcaattggtaacgtgattaaagcacttactaacagtatccctacaacacgcattgaggcagaaataaccatcgctacaataacaataaataaaaattgaatccatttatgaatgccaatgactttactatattcctcatcaaatgacaatataaataattctttataaaacaatgtaataaacagaacaactatgatggcaatgacaataatcgttgttaaatcacttatattcactgcgcttattgagccaaatagcaatccaacaatttcttgattgaacccatcagctaatgaaatgaagattgcactcaaggcgataccagcactcattataattggaatagcaatttcttggtaagcagtgtatgacgttcttaatttttcaattagaagcgcacctactattgcgaataagattccaaaccacattggattaataaatactagtgttggcataatagtaagtaaaaacataccgaaggatataccacctaaagttacatgacttagagcatcagctataagtgatagtcgtctaacaacgataaaagcaccgattagaggcgcaataaaacctatcaagataccactaattaaagagtacctcataaaatcaaaattcaataatgcatctatcaattgtgacacgcctttccattttaaataaactcaaatctttattaattacaacattctcgattatgctgatgatcgacaaaacgtacaggatgtccataaatttttgaaatttcaacttcatcaagtgatttaaactcatcagttgtaccatggaaatgcaaatgcttatttaaacatgctacttcagtagcagtatctgctacaacaccgatatcatgagtaactaagataatggtgataccttcttgttttaattgatctaaagtattataaaattcacttacatgttttgcatcaataccattcgttggttcatcaagtactaatactgcaggttctgaaatcaatgctcgggcaatcattacacgttgttgttgaccacctgataattctgctatatttttatgaattaaatcacttatattcagtctttctagtactttaatcactttttcattatctttgctattaaatgtttggaaaagacgttttgtctttgttaatccgcttaaaacaacttctttaacacttgctgggaaacctgaattaaaggcatttgctttttgtgatacatagcttaatttaattgatgttttcttatttttaaaatcaataccttcaacaaaaatctcaccactttgtaaaggtaataaccctagaatcaacttcaataatgttgatttaccagcaccatttggtccaacaatcgctaaaaattcacctttatttattttaatgtttatattttctaacacttttttatgatcatagtagtaattgacatttttcaattcaaagactggtgtcatcgtattctcacctcgcattcaactatacaactcctagtaacatatgtaaacagtaatgtttacgactcaaaattagacaaaataaagagatatgcccccttcaagttttatttatcgcatttcttgaagagagcattatcattttattgttgcataaccttattttttaattctgggtcaaattgctgttgttttaacatttcaatttcaagtttatatggcggttttttatttttcttatcttcaccaacataaggtgtttctaagattttcggaatatctttaaaactatcatgatgcacaatgtaatttaatgcatcaaaaccaatgtaaccgaagccaatattttcatgtcggtctttttgagcgccacggtcatttttagaatcattgacatgaacaactttgattctgtcgactccaataattttatcaaattcatttaatacgccatcaaagtcctctttcacattatatccagcatcatgcgtatgacatgtatcaaaacatactgataaacgttcgttattatgaactccatcaataatacgtgctaactcttcaaacgagcgaccaatctctgtacctttacctgccatcgtttcaagcgcaatacgtacattattgtcattcgttaaaacttcatttaatccttcaataatcttattaattccggcatcaacaccagctccaacatgcgcacctggatgtaatacaatatctttagcgcctatagcttgcgttctttcaatttcttgttgcaagaaatctacaccaagattaaacgtttctggtttggttgtatttgcaatattaatgatgtatggtgcatgaacaacaatattagataagccatatttttccatcacttcatgacctttagttatatttaaatcttcaatacttttacggcgcgtgttttgaggtgcaccagtataaatcataaatgttgtttcaccatattcatacgcttctatagcagaaccttctaacatctttttaccactcattgaaacatgtgatcctaataacataaaacacacctaaccttttttgttttgcttacgtttttgtctattttgctgcttactaaattgtttacgctcttgacgtttcattttttcaacttcttgtttaaatttcttcttataacctggtttaactttgtttttaattttacttcgaactttgttcttcacttgattagttaaatggtcatctttgcgcattcttgcttgacgctgattgtgcgctttaacttcttttaactcaccatctttaatatcaacagtattgaatacaaaaccgcgatcttctattaatgaaatattgtgttcttcatcaggactataaagcgtaattgctacacctttataattcccacgaccagttcgtccaactctatgcgtaaagaagtcaatatcatttggcacatcaaaattgatgacatgactaacaccttcaatatcaataccacgagatgctaaatcgctggcaataacgtattggaattctaaattacgtatacgtttcatttgttgtttacgttcacgtggcgttaaaccaccatgaatcataccaactttaataccagcttcatttagtgaacgtgctaaatcatttgcattatctctactattacagaaaataatacataagtatggatttagtatatcaattaaatttaaagttttttcaactttagctgcacctttagtaggtattaaaaagaattcgatgttctttttattttgttttttactgtcgacagctacatattctggatgacttaaatatttatttaaaaatggttgtaactgttgtggaattgtagcactaaacaccgcaatatttgcattatcttccaatcttgcagcaatgtaatctacatcttcaattaatcctaagtcaatcataagatccgcttcatcaataactaaatatgatgctaagtgcacatgtaaatgtcccgttttagctaagtcattaattctagtaggggtgcctataatcaattgtggttgtgcattacaacgttgtctatctttctctatatctgtaccaccaataaaaactttaactgaaacaccagctttaaattggcttaaatggttcgctgcatcgtatagttgttgtgcaagttctcttgttggtgcaactacgattgcttgtggttcttttatttcactatcaattaactgcattaatggtaataaaaatgcatgagatttccctgtacccgtttgagattgaccaattaaatttgttctctttagtattcttggaataattcgattctgaatttcagttggtttttcaaaattaaggtctttcacagcgtcaattaaactagattctagattaaattgttcgaatggatgttttgccatgatttggcctccttatatgttcatctttactattataaagtataaatgtgctattttaaataaaaatattaaaacctcgaaatttcaaaatttagaaatcccgagattttagtttaaatatattgaaatggatctgtattaattgtagatgcttcaacatctatatttattttttctatattgaaccaattcattagtaacgtttttaaaccttctttcatcacatattcgctgtaatgattaatatcaattaaattcacaccatgaattttagcatctaaggcatcatgatgtttaatatcacctgtaacaaagacatctgcgccttgttggacagcttgatattcatatccaatacctgaaccaccaataattgcaatacgtttaattttctgattagactcaccaacaaaacggacacttgggatatttaatttagatttaatatcagctgcgaaatcttccaatgtcatttgattatccacttctgccataacgccaagtccataaagggatgtttgttttatctcaataaaatcaaataccggtgtttcatatggatggtattgtttaattaattgctcagcccttgacttttgatatgcatctatcataaattcaattttaacttcatctacatcttcaattttatcaatttgtcctattgttggattagcttcaccaactggtttgaattgccctcttccttcactttcaaagaaacaatattcataattaccttcttgcgctaatccattttcactaagcttatctttaaatggtccaacattatccttaggtatatatgtttgaactttatagtatacatcttgttgattatttattattgaaatgttcttcaaacccatcgccttcgccaacatcatattgacaccatacggatttacatctaaatttgtatgcatcgctattaaattaatgtcatgttgaattagttttctaatgatcaaaccataaccattagcttttaatgatgttacgcctttaaagattagaggatgatgactaataatagtattataacctttttcgattgcttcatttactacttccaacgtacagtctaatgctgttaaaacaccagtaacttcaacatctccatcacctattaacaatcctacattatcccaagattcagcagtactaaatggcacatgatgatctaacaatgtcattaaatcagctattttcattactataacactctttcaattacagcaatttcgtcattaatttgagctaaacgttgatgatgttgttcagtattgagtttcgatttaatatgataaagtgcttctaactctctttgccatttttttataaaatattcatttttgttgttcagcaattttggtccgaatttcaattcatcagatgatagctctattaattgtgtagaatgttctgctacaacaatttcataaatatggcctttttcttccattattatttcatcaattatttcataattcaattgttgtaatgtttgtcttaaattttcagtttgtatattactttgtaaaatcaaccttggatgttgacttaacttatcttgcccatcttttaaaattttagcaataagtggtccgcccataccacaaattgtgatattatcgattacgtcctcaggatgaataacacttaagccatcccctaaacgtacatcaattctttctactaaatgatttgcagctacatttttcacagcagcttgaaaagggccttgaataacttctccagcaataccgcattcgcataaatggttttgaattgcatagattggcaaataagcatgatctgagccaatatccgcgattgtaccttgttttaaaaatcgacttaccgtcgttaatcggttatttaacgaaatcattttattctcctttatgaaaaaagaggttgaacattattcaatgtaccaacctcactcaagttaaatcttaatctaaaaataaataagcgcttattcatgtcttggtatcaatcattaaaattgatataaattaatccataaagtctttcaaacgtttactacgacttggatgtcttaattttctaagtgcttttgcttcaatttgtcgaatacgttcacgtgtaacaccgaaaactttaccaacttcttcaagtgttcttgttctgccgtcatcaagaccaaatcttaatcgtaatacattttcttctctatcagttaatgtatcaagcacatcttctaattgctcttttaataattcataagcagcatgatctgaaggactttgtgcttcctgatcctcaataaagtctcctaaatgactatcatcttcttcaccaattggtgtttctaatgaaacaggttcttgcgcaatttttaaaatttcacgaactttttctgctggtaaatccatttcttcaccaatttcttctggtgctggatctcgacctaagtcctgtaataattgacgttgaacacgaattaatttattaattgtttctaccatatgcacagggatacgaatcgtacgtgcttggtcagcaattgcacgagtgattgcttgtctaatccaccatgttgcatatgttgaaaacttaaatcctttgttaaagtcaaatttttcaacagctttaataagacccatattaccttcttggattaaatcaaggaataacataccacgacctacgtatcttttagcaatacttacaactaaacgtaagttcgcttctgcaagtcttgattttgctacttcatcaccttgttcaatacgtttggctaattcgatttcttcttgtgcacttaataagttaacacgcccaatttctttaaggtacatacgaactgggtcatttattttaacacctggaggggcactaagatcacttggattcagtttctcgtcagtatctgaactatctttttcattaactagtgaaatatcattatcatttaattgatcaaagaaatcatccatttgatcagagtcgatatcaaaattctgaagtttttcagcaatttcttcatgacttaaatgaccctcttttttacctttttcaattaattgcttcttaacatcttctaatgttaatgtcggatcaattgtttgttttttaattttaactgtgttatcagacatgaaacggcctcccgattttaaatatgaacattcgaaatttattcaatattgctattttaaactaaattcttaattaattcatccatatttttaattttattttacaaattggaactaatcccaatatttatttttcaatagtgttgtttaaatgcggtaactatcatttacccttatacattttgacataatcattattcgtattattctttaaaatcacatgctacatgcgttctttattcttagcaacaatttgctgtaaatagtatttttgtaattctacatcgccaatccttgtagcttcccttaatttatgattcaatgactcaattgtttcttgtcctttttcattaataacattgacataatcatcaatttcattttcatatggttcgtcattcaaattatattgttctaagctaattagtgtttctctcaactcatttgaattaacatactgcacagcatcactgatattatattgatcattttccgcataaaaatcatgtaagacttcgaaaacatatttaaaatgctgatttgtgaagttatccttatcaacactttcataataatttaaaaatgtatctttatctctcattaaatgttttaaaaatgctcgctccgctttttcttgacggctcaaattgtcaaattgtgccataccaattggctcaggttcaatataaccgccatactcatcataaccgccatactcatcttctggataataattggctggtgcttgattgaattgtatttcgttagctaactgctcaggactaacattgaaaaatggcgcaacatcatttatagccttttgttgcagaattgatgacttcataagtgaaatgtcatgactcagttctttcaaataacgttcatatgaaaggtcattatgtgcaatttcatcttttaatatacttactttataatgtgcaaatgactttttgtcattttttacaaaagtagtaaatgcgtcgttgccatacttaccaatgtattcatccggatccatgccagatggcaattgtataacaaatacatttagcccttgctgtaacaaatgttgacctgttttaagtgttgcttcactacccgcaaaatccccatcaaacattaatgttatatttgatgttaactttcgtataaaggtaatatgttcatctgacaactgtgtacccattgttgcaacaacgtttttcaagccagcagtatcagattttataacatccataaaaccttctagtaatacaatttcatctaattttctaattgatttacgtgctttatctaagttatataacaactttcttttttgaaagataggcgtttcaggactatttaggtattttggttcttgaccggtatatgttcgacctgaatatccaacaattcttccttgcgcatttttcaaaggaaacataatacgatttcgaaatctatcgtaataactgaaattttcttcgttacgtgataataatccggcttcatatgctaattcaatatcgtaaccctttttttgaagaaaatcatgacaaaaatgtgagctatcgggtgcaaagccaatgcctcgctctttaataagcgcatctgtaaaaccacgttcttgtaagtatgttaatgcttgttcgccttcgactgtctttgttaaagcgtaataataaaattcttgtattaactcatgcatttcaatcatttgtaaatcatcagaagcaatttgaacatttgagttagattgtgttgcctcaatatctacagcaacattaactctatcacctaattctttaaccgcttcaacaaatgatatgtctttaatttcttgagtaaattgaaaaacattgccaccttttttacaaccaaaacaatgacagatttgtttatcttcagaaactgtaaatgaaggtgtcttttcatcatgaaaaggacacaaacctatataattgcgtcctctcttttctagttttacatattcacttaccaagtctaaaatgtcggttttatcttttatttcattaatgatcgattgatctattcgcaaattaaatcacctattaagcattagttatactattatacctaatttttgacaaaaatgaaatcatttcgatttattttgttcaatataatggattatatcgtttgctgtttcttcgattgctttttgagaaacatcaatgacaggacatccaatttcacttacgatttcttcaaagtaattcaattcttcttggattcgagcttctgttgcataacgagctgtgtcacctagtcccaattgttttaatcgctcttttctaatgcgatttaatttttcttcacttattttaagtgcgatacatttcttaggatcaatatcatataagccatctggcggtgtcacttctggtacaatcggtacattcataactttgtaactcttatgcgctaaatactgagataatggtgtctttgaagttctcgaaataccaagtaaaacaatatcagctttaggtaatcctttaggatctttaccatcatcatatttaaccgcaaactctatcgcatcaattttcttgaaatatgcatcatctaatctatgaacgatacctggctcattataaggtttttcttcaaccgatgctgataataaatccattaatggccccatgatatcaacggacttcaattggaattctgctactttctcactcatatattgcttcatttcaggtttaataagtgtataaacaatgatagcatttgtatcttttgcaacttgaatcacttcatcaacatcttcaaaagattcaatatatggatatcttaataattcatttttacattgcttaggattaaattgtgaaatacctgccctagcaactaactctgccgtttcacctatagaatctgaggctacgataattttaattttttccattacttctcacctattctttatataatgctactaataacttagctattgttgttttggaaattcttccaattacttcatacttttgattatctttttttcttacaattggaatcgaatcaatttctttttcaatcattctatctgctgcgtatatgactaattcgctttcctctaaataagtgacattaggcatacgtgtcatatttacactgataggtactgtatgaatatctgctccaatcattgaagctcttaataaatcttttcttgaacacacaccaacaaaatcgttatcttcattaataataaataatgtacttacatcttctaaaaaaattgtacaaatagcgtcataaactgttgtattctctcttagcacaacaggttgagacatatagtccttaacctcaaattgtcgaagtttttcattaaaaaatttgccttttgatttacctgaataataatatccaactcggggacgcgcttctaaaaaacctgacattgttaatatcgctaaatctggtctaagcgttgctcttgttaaattcaacttatctgctatttgttcaccagtaatgggtcctttagttttaacaatttcgatgattcgttcttgtctttgactgagttctataggtcttcaccccttttttattcacttattattataccgatatttctttcatgtcacaaacacattaattttacttgcctttaaataatctatcaattagaataaacgtacagcgagttaaggatagtgtaagcttaacaataagattggcgcaacgaatcattttaaaataaaagcgagtgactacactaatttgggtggaaccgcgggttaaatacgtaacttattttgtattatatacaatttaaaatattaactcgtcccatggaagtaaagcatatttactatgctgttattttccatggggcgttttcatgtatgaggagaggtaattatggcaaaagatatggatacaattgtttcattagcaaaacacagaggttttgtgttccctggtagtgatatttacggtggtttatcaaacacatgggattatggtcctttaggtgttgaattaaagaataatgttaaaaaagcttggtggcaaaaattcattacacaatcaccgtttaacgttggtatcgacgctgcaatcttaatgaatccaaaagtatgggaagcttcaggacacttaaacaacttcaacgacccaatgattgataataaagatagtaaaattcgatatcgcgctgataaattaattgaagattatatgcaagatgttaaaggtgatgaaaacttcattgccgatggtttaagttttgaacaaatgaaaaaaattattgacgatgaaggtattgtttgtcctgtaagtaaaactgctaactggactgaaattcgccaattcaatttaatgtttaaaacattccaaggtgtaactgaagattctacaaatgaaattttcttacgtcctgaaacagcacaaggtatttttgtaaactataaaaacgtgcaacgttcaatgcgtaaaaaattaccatttggtatcggtcaaattggtaaatcattccgtaatgaaatcactccaggtaacttcattttcagaacaagagaatttgaacaaatggaacttgaattcttctgtaaacctggagaagaaatcgaatggcaaaattattggaaaacttttgcaagtgactggttaacaagcttaaatatgagcagtgaaaatatgcgtttacgtgatcatgatgaagatgaattatctcattactcaaatgcaacaactgatattgaatataaattcccatttggttggggtgagttatggggtatcgcaagtcgtacagacttcgacttacgtaaacatgctgaacactctggtgaagatttcagataccatgatccagaaacgaacgaaaaatatattccatattgtatcgagccatcacttggtgcagatcgtgtaacattagctttcttatgtgatgcatatgatgaagaaggcgttgaaggtagtaaagatgcacgtacagttttacacttccatcctgcattagcaccatataaagcagcgattttacctttaagtaagaaattatctggcgaagcgattaagatttttgagcaattaagttctaaattctcaatcgatttcgatgaatcacaatctatcggtaaaagataccgtcgtcaagatgaaatcggtacaccttattgtgtaacattcgactttgattcattagaagataatcaagttacagtacgtgacagagattcaatggaacaagttcgtatgccaatctcagagttagaagctttcttaactgaaaaaacaaaattctaattaaaaagactttccaccatatgtggtggctatataatttataaaaagagatactggttagtaaaattgccagtatctcttttctattcaaaaaggtattcaaataaacacatctatgtggctacttgaataccttttattattttatgttattgttccaatctttttaattggttgattagtttctgacttttaaaaaacatacctgcatattcacgatataacattaaaatgatatctgacatttcatcaataatttcttgatggatattcaatgaattcattttatctatcggtaatttttgtaatacatctaataaatatagtgttttattcgataatataactgcatgtacatctttagaagcctcttgccttgaaatcgcaccgtcaaacttaaaactataacctattaaatctgcttgtgtgtcattaccactcacagcacagcgattaaatgatgcagtaaaaccaaatcgtttcatgcactttaacataactacgactgacattaactgtgcagatgtacctgattctattttttcaagaacaaattgtaataattgatagttatatggtgcaatgtcaccttcatccattgagcgctcaatagtttcagctgccagagaggcataactgcttacgtaaaggtccatttgtaatttataatgttgactaataacatctacagaatttaacgttcccatacctcgccactgattgtaaataaacaaaccataaacaaacaattgcgtttgcgcttgtaaacccgtcttaacttttttagcacgccttgccataagtggtacttttgcaccatgctcatttaaaatcgtgataattttatcagattcaccataatcaactgctttgatgataatccctttttggcgcattaacaattatcttcaccacttttaagattaatcttggtcttcaacataaccaatttggcgaataaagttaactttgtttcgccagtctctttgaactttgacccataattctaagtatactttagagcctagaagcatttctatatcacgtctcgcacgttttcctacttcttttaactttttaccgccttttccaatgacaattcctttttgcgaatctctttcaacatatatagttgcttcgatatgaacacgatcttcgctttctttaaccatacggtccacattaacaccaatcgcatgagggatttcttcacttgtaagatgaaggattttttcacgaatgatttcacccactacaaattgttcaggatggtctgaaatttgatcatctggataatatttaggtccttcgggtaaatacgtctttaaaacatcaataaaatgatctacatttagcccttctaatgctgaaataggtacaatctctgtaaagtccatataactttgatattcttcaatctttggcattaattcatctggatgcactaaatctattttatttaatactaaaaatactggtgtcttaacatttttcaacatttctataatatattcatcgcctcgtccaatttcctcattggcattaaccataaacatgattgcatctatttcagataatgtatttttagcgactttcatcatatagtcacctaatttgtgtttaggtttatgaatacctggcgtatcaatgaatataatttgcgcgtcatctcttgtcataacaccttgaattttatttctagttgtttgagctttatcggacatgattgctattttatggccaatcactctattaacaaatgttgacttccctacatttggtctacctataattgaaacaaatcctgatttatgttctgtcatttattctaaatcctttcctgaaaatccaaatggtagtaactctgcgactgtcatcataaccatatctcctttatgatttgtcatatacacaggcatatcatcatcacataattcctttaaaacttgacgacatgcaccacaaggtgatgacggtttatctgcatctacggttacagttattgattcaaaatcacctggtctgtatccttgagaaattgccgataccaaactagctcgttcagcacatatcgataatggataagaagcattttctacattggtaccataaaaagttctaccgtctttcgtttttaaataagcccctactttaaattgactgtatggcgaatatgattcttgttgtgcttttctaacttcttgaaaataatgaggttgataactcatatatgcctccctaaaataacgctataaaatgtggtaaaaatactattaaacctataataaatgctaatattgaaactataagtacactaaaagccgctatatcttttgcgtatttagctaaatcatgatattcaacggtcactaaatcgacaacatattcaatagcagtgtttaaagcttcaacagtgagaactaatgcaatagcaatgagtataaatatccactcaatacgattaatatttagtacgagaccaaagacaatagcaacaatcattgcaaacacatgtaaaagaaatttatagtctttttgaattaagattttcagcccatcaagtgcatatttaaaccttttcataattagtctcgtgttaatccataagcgtttaatattgtatcttgtcgaccaaacatttccttttcatccgcttcagtcatatgatcataacctaatagatgcaaaaatccatgtaatgctaaaaatcctaattctcgttcaaaagaatgtccgtaattgtttgcttgttcttgcgctacatccgtacagataattatatcccctaaaacacgtggtatatcaagaccactaaaatcaatctctggctcatcttcttctaaagcaaatgagattacatctgtaactttatctttatctctatatgttcgattaatttcttgtatttcttgtttatctacaaatgtaacagaaagctcagcatcgtcttctatatgctcttcttttttagcaaattctaataaatcttcaatttgtttataccacgcatctttaactaagcctgtgtgatcgctaaaatctatcgtaaacatttaattctctccttcataatgttcaatgatcttacttaccaatggatgtcttactacatcgctctgatctaatttcaatatacttatacctttaacgttgtgtaacctactgaccgcttccttaagtccacttttaacacctttaggtaaatcgatttgagtttggtcaccagtaactaccatttttgagccaaaacctagtcttgttaaaaacattttcatttgcgcatgtgtcgtattctgcgcctcatcaagaattacaaatgcatcttctaatgttcgtccgcgcatatatgcaagtggcgctatttcgataatgcctctttcaataaatcgctctgtttgttcacgcccaagaacagtatatagaccatcatataaaggtcttaaatatggatctaccttttctttcaaatctcctggtaaaaatccaagtgactctcctgcttcaacagcaggtcttgttaatacaatacgtttaacagcacctttacggagttgctttgctgcataaactacagctaagaatgtcttacctgtaccagcaggacctataccaaatactaaatcattatttttcatggcattaacatatatacgttgccccatcgttttcgcacgaatcgtcttaccaaatgcatctttagttatctcttcatcatataaatctaacagatgttgaattgtgttattatgcgccattttaatagctgcttcaacatctttaattgtaatattattacctaaatcaataaccttcagcaaattgattaatactgattccgctttttctacgttttctatttttgtacctttaacggcaacttcttgtcctcttgcatggatgacaacatcgaaactctcttcaattgcttttaaatgttcatcattatttccaattaaagcttgagattggttcatatcgtctatttgtataattccaggcatacacgcgctccttttcatatatcatttatattcattctatgatgctttaatatctacttaattatatcatgcaattgattgatttaaacatctttgcattgacttactcatttttctttaatttaaaataatcatttatacttttcaccttgtcataaaagcagtttcaattttagactaatcaattttttgctgtaatttaaataactaatatttctcgaaagattctctttgttttttaatttttcttaacgtaaaaaaacaagcaactaccattacgatagtgcttgttttcaaaaaattttataattgttttggtttagctaaaatttctgaccatatcataccattgattacttcatctttatcaaattggaacgctgatttagtcaaatctttttcgacattttgagaattaagcaactgctttaatttcaaacgttttgtacgttcagataagtatttatcctcaataatatctctagcacgtttttccattttagcaatttgcttttctttttctctatcaatgtcagtacgaatcgttttaatatcatctctaagtgatttttctaattgacgtctaatttcgtcagaattatcttgtctagaaggtctatgtttctgctccaccggttctgctttaggcactgtaattggtttctctgtcatcggttttgtttctggttgttttttaggtgccataggttctacaacaggtttcgatttaggctcttcctttggaagttcatcgaataaaggtggtaacgtatcatcatattttcgtttcgatgatttcttttcttcttcatttaattcttcacttatttttttaaacgttcgctcaatttcttcaaaaaagccacctttttttggttcattatcggtagatgttttttgaggtggcttttgattttgtctatctttatgactattttcgcgcatagtagtaatgatagaaatgatcactgatatgacaaaaattagaataccgacactcatttaatcacctctcgacttaatgttcaggtgactcatcatcactttgatcagttcgtttattaattgcatttctcatgcctgtatcagcttcgatatttttcaaattataataatctttaacactgatattacctgaacgtaatgcttcagccatagctaatggtacttcagattcggcttcaactactttagcatgcatttcttgtacacgcgctttcatttcttgctcagttgctacagccatagctctacgttcttcagcttttgcttgtgcaatatttttgtctgctaatgcttgttcagtttgtaagtctgcaccaatatttttactaatatcaacgtcagcaatatcaattgataaaatttcaaatgcagtacctgaatctaaacctttgcttaaaactgttttagaaatattatctgggttttcaagtacttctgtatgatgcttactagaaccaattgttgaaacgataccttcaccaacacgtgcgatgattgtttcttcacctgcaccaccaacaagtcgagcaatattagctctaactgtgatacgagctttggctttcacttcaataccgttcattgctacacctgcgataaatggtgtttcaatgactttaggattaacagacatttgaaccgcttctaatacgtcacgtcctgcaaggtcaattgcagcagcacgttcgaaaggaagatcaatgtcagcacgttgtgcagcaatattagcatcaacaactctgtcaacatttcctcctgctagataatgcgattctaattggtttgttgttaatgctagtcctgctttgtgcgctttaattaatggcgctataacttttcttggagatacacgacgtaaacgcataccaaccaatgtacctataccaacatgaacgccagctgctaacgctgaaatccacaaaccaatcggtacaaatgagaataaaataagtaatgcaactattataataactgctattacgataaaacttaaactaaacatggtatcgctccttttaattaatctacttccctcacaactactcttgttccttcaacttcaaggattttcaccgttttattgcgtaaaataaagttgccatctgaaacagcatcaatacgttcattttcacaaaaaataatccctgcaggtcgaagatctgtaactgtttgagcagtctttcctacgaggtgcgagcggttatcatgagaattgtaacctgactcagaattagttgaatcttttaagataaccttatccaaaaacggaatctttctgttgaaaatcttcactaatatcacccattctacaatcgttaaaatcaaggcaacgataacattcgcaagcataaatagcaaattatcaccgagcgttgttatgcttatagttatcagtatcatgccaataataccaattactgcaccaactacaaataattcaattacaactaatataacgccaattgagaatattaagatagaatgcatattgacatttccttggattagaaatcccaaaaataaaataagtaatgataatgtggcgataataccagctgcattgatttttttagagtaaagttgatatacaaatcctaagaatgtcaaacaggttaatattaacgtaaaaataggttgaacaattatattactaacttgttcaacccaagtatctccagccgttgattccaagatagttgtcatttgtaaaaaattattataactcacaatttcacctcgccctcacattaattatacatgaaattgaatatactttatagttataagaacctatagaatatcaatttgattatttataaactatataactttttttaattaaaaattgacaacaaaaaaacatcacatattagtgtcagacactaacttgtgatgtttattttatataattaatattcgtgttgagggagtcaacagaggtattaattatttgaatttacgtttacgtgcagcttctgatttctttttacgttttacgcttggtttttcgtaaaattcacgtttacgtacttcttggattgttccacttttagaaactgaacgtttaaatctacgtaacgcatcttcaagtgattcatttttacgtactactgttttagacatctgtatttccctccctccaaatatcaacggaactttatagtcaattgcacagtaaaactatgcatttataagtataatatatctgtaatttatggtcaattagtaaattgttttttatttgaaacatatttcacatcaaaatcacaaagacttttagattttgttctaaaaatctcttaataatttatttaatgagaagagttgcttatatagtaaattgtgaagccgttaaaacaacgttacaaaacctatatctttaatacggaaccttatggtatgaatcaaggaatacttaaactaaaacttctctatcagatttatttgttgcgaaatcaacaactttaattgcttgcccttcatttaatggataatttgcttgcgtaattttaacttttacaatttgacctatgagtgattcgtcaccttcaaattgtactttcatataattatctgcatatccaactaatgtaccttctgtgtcaccctgttcctcaggaattacttcaagcacatcttgatcaaatttagacgcatataactttccgagttgattgcttagcgtaattaacttatgcacgcgttcatttttaatttcttcatcaatttggtcatccattcttgcagctggcgtgccaattctaggagaataagggaaaacatgcagttcagagaacttatgctttacgataaaatcatatgtttcttggaactctgcttcagtttcacctgggaaaccaacaattacatcactcgtaactgccaagtctggtaaagctttatgcaattttgttaatcgttctgaaaatctatccattgtatacttacgtctcatacgttttaatactgtatctgaaccagattgtaatggaatatgcaaatgacgcacaacttttgttgaacgttctaaaacgtcaattacttcatctgtaagttgacttgcttcaattgaagaaattcgaattcgttctaatccattaatcgtttcaagatcacgtaataattgggccaagttataatcttttaaatcttgaccatatccacctgtatgaattcccgtcaatacaatttccttatatcctgaattcactagttgcgtcgcttgttcaactactttttccggatctcttgaacgcattaagccacgagcccatggaataatacagaatgtgcagaagttgttacaaccttcttgaatttttaatgacgcacgtgttctatctgtaaaatatggaacatctaattcttcatatttacgatttttcatgatatttccaacaccattaattggttggcgttctttacggaattcatcaatgtaacctaatagtttatgtctatcttgtgtaccaactactacatcgacaccaggaatttccataatttcagctgatgaagtttgcgcataacaacctgttacacagattacagcatcaggattttgtcttattgcacgtctaattatttgacgactttttttatcacctgtattcgttactgtacaagtattaataacaaatacatcagcattcgcttcaaagtcaacgcgctcatagtttgcttctttaaataattgccagattgcttcagtttcataatggtttactttacaacctaatgtgtgaaacgcaactgttgacataaatattcaccccattaattctttttcataacttattgcacttaacgcatacaatggcgcagtttctgcccgtaaaattctcggtccaagaccaacaactgtactagtattactaaataatgaaatttcattttctgacaaaccaccctcaggaccaaaaatcatcaacactttatcctgagccttgaattgttgtaaagtttgcttgaaattgcttaactcaccatcttttgcttcctcttcatatgcaataagaatatagtcataattatcaatagtatcacaaattaattttaaattcgactcgaattgaatagatggaatcactaaacgatagctttgttcagcagcttctttaattattttttgccaacgctctatctttttgacaactttcgcctcgtttaatttaacaattgagcgttccatgctcacagctataaatgatgaagcacccaattcagtagctttttgtagcaaccactcatatttgtcagctttaattagtccactgcaaatcgtaacatcaactggcaattctgtattaatattttgtttttcttttaaatcaactgcaattttatcacttgttatgtcagcaatttcacataaataaactgtttgatcattaaaagttaaaataattttactaccaacatcatatctcattacatttgttatatgatgaatatcttctttttttgtaataaaaaaacgctgacttacatcagcgttttggtctatgaaataacgttgcacattattcactcactttctggccaacaagacaaacccaaccattgtcatgttgttctgaaataattttaaaacctacacgctccatatgtgactgtataccttcatacttctcttttataataccagaagtaataaaataaccgccttcatttagagtattataagcatcttcaatcatttcatcaataatatgcgctaaaatatttgctattacaatatcaaatttttctgtttcgtctttcaataagttacctggaacagcttcaattaacgtttcacaatgatttcttctgaagttttctttagctacactcactgccatttcatcaatatccaacgctttaatacgttttacaccgattagatgacttgcaatacttaatatacctgagccagtaccaacatcaattactgaatgctgtggcaatacatatgtttctattgccttcaaacacatacttgtagtcggatgatcgcctgttccaaaagccatacctgggtcgagctcaatgcaaagctcttcatccgcttctttagcatatgtttcccaactaggaactattgtgaacttcttcgacgctcggaatggatggaaatagtttttccattcattttcccaatccgtctctgcaataatttgctcactgaattgaatgttatgttgatcaagttcatctaaatttaataactcatctttaatttgctgtcgcaacttatcatcataagtcatttcattaaaataggctttcaatcttactcccttatctggataatcctcttttttcaaagcgtaaatttcaccgtatttatcttctggttggttaattaaatcatctgaatcttctatcacgacaccatttgatccatgattttcaagtatattggtagccaattctactgcttcatgattaataataattgaaagctctgtccagttcatactttattctcccttaaagaatctttttgctctatctttaaaattcgaaggttgttcattaatttcttcaccatttaattgggcaaattctttcattagttctttttgtctatctgttaatttagtaggcgttactactttaatatcaacatataaatctccgtatccatagccatgaacattttttatacccttttcttttaagcggaattgcttacctgtttgtgtaccagcagggattgttaacataacttcattatttaatgttggtatttttatttcatcgcctaaagctgcttgtgggaagctaacatttaatttgtaataaatatcatcaccatcacgtttaaatgtttcagatggtttaactctaaatactacgtataaatcaccagcaggtcctccattcacgcctggagagccttcaccagctaatctaatttgttgttcattgtcgacaccttcaggtactttcacttctaatttaactgttttattttcagtaccttttccgtgacatgttggacaagcttcttcaaattcttgaccacttccattacatttaggacaaacttgttcagtacgaactctacctaaaattgtgttttgttctacagctacatgaccagcgccattacagtaactacaagtctttttacttgttccaggctttgcaccatcaccatgacatgtttcgcatgttacatctttacggattgaaatttcttttgttgtaccaaataccgcttcttcaaatgttaatgtcattgtatactgaagatcatcacctttttgcggtgcatttggatctctttgtctgccgccaccgaagaaagagctaaagatatcttcaaaaccgccgccaccgaagccactaaaaccgccaaagtcagagccattgaatccttgtccaccaaaaccttgtggaccatcatgtccaaattgatcatagcttgcgcgtttattatcatcacttaaaacttcataggcttcagaaatttctttaaacttttcatctgcaccttcttctttgttaatatctggatgatattttttcgaaagctttcgatacgcttttttgatttcatcttttgaagcatctttactaatgcctaaaacttcataatagtctcttttggccacagctatctctccttttcttaattaactcatatagtttaacgtaatatgtcatactatccaaataaaaagccaaagccaatgttctattgactttgacttttcagatcatgacaacattctaattgtattgtttaattattttttgtcgtcgtcttttacttctttaaattcagcatcttctacagtactatcgttgttttgaccagcatttgcaccttgtgcttgttgttgctgttgagccgcttgctcatatacttttgctgataattcttgaatcactttttcaagttcttcttttttagatttaatatcttctatatcttgaccttctaaagcagttttaagagcgtcttttttctcttcagcagattttttatcttcttcaccaatattttcgcctaaatcagttaaagttttttcaacttggaatactagactgtcagcttcgtttcttaagtctacttcttcacgacgttttttatctgcttcagcgttaacttcagcatcttttaccatacggtcgatttcttcgtctgataatgaagaacttgattgaattgtaattctttgttctttatttgtacctaagtcttttgcagttacatttacaataccgtttttatcgatatcaaacgttacttcaatttgaggtttaccacgttcagctggtggaatatcagtcaattggaatctaccaagtgttttattatccgcagccattggacgttcaccttgtaatacgtgtacatctactgatggttgattatctactgctgttgaatagatttgagatttagatgtaggaatcgtagtgttacgttcaattaacgtattcatacgtccacctaaaatttcaatacctaaagatagtggtgttacgtctaataatactacgtctttaacgtcacctgtgataacgccaccttggattgcagctcccattgccactacttcgtccgggtttacacctttgttaggttctttaccgatttcttttttgacagcttcttgtactgctggaatacgagttgatccaccaactaagataacttcatcgatatctgagtttgttaagccagcgtctttcattgcttggcgtgtaggttccattgttcttctaattaatgaatctgataattcttcaaatttagaacgagttaagtttacttctaagtgtaatggaccgttttcaccagctgagataaatggtaatgagatttgagtttgtgatacacctgataagtcttttttagctttttcagcagcatctttcaaacgttgtaatgccattttatcttgagataagtctacgccattttcttttttgaattctgcaactaggtagtcaataattacttggtcaaaatcatcaccgccaagtttgttgtcaccggctgttgatagtacttcgaatacaccgtcacctaattctaggatagatacgtcaaatgtaccgccacctaagtcaaaaacaagaactttttcatctttatcagttttatctaaaccatatgctaatgctgcagctgttggttcattaatgatacgctcaacttctaaaccagcaattttaccagcatctttagttgcttgacgttcagcgtcgttaaagtatgcaggtactgtaattacagctttgtcaactttctcacctaaatagctttcagctgtattttttaagttttgtaaaatcatagctgagatttcttgtggtgtgtatgatttaccttcaatatctactttataatcagtacccatatgacgtttaatagattgaacagtgtttgggtttgtaatagcttgacgtttagctacttcaccaacttgagtttctccatttttgaaagctacaacagatggtgttgtacgtgaaccttcagggttttgaattacttttggctcatcgccttctaatactgttacacatgaatttgttgtacctaagtctataccaataattttactcataataaaattcctccatttaatcattaaattaatttaattttaaacaatgtcttttcgccaaatttaagttattggtttactttgaccattgatggtcttaatactctatctttaagcttgtatcctttttgtagttcttgagtgatttcgccagattcaaaatcagggttatcatcttgaactacagcttggtgaatatttggatcaaatgcttcaccttcagttttaataacttcaagaccattatcttttagtgcgttaatcaaactttcatgcaccatttgtacacctttttgaagagatttaaaagtctcatcatcaccttcaatttgaagtgcacgttctatattgtctattgctggtaaaatatctgttaacacacgttgtgcttgatatgttttatttatttcattttctttttgaattctacgcttataattttcaaactcagcgtagagccttaaatatttctcttcgttttcatctgctaattgttgaagttcattaattttttgatcttttggatctatttcttcaataacattctcgtcagacgtttcttctattgcttcatcttgtaaatgacctttactttcttcagcttgttcaactgaatcatcaatattttgtttgatgtttgtttcttcaactgttgattcagtgtttttttcaactgattcgtctttatttgtcattttctgtcctccaatactttctaatccatcattaccaaattctatttaataattgaatgacattttgataatgcatagctgtaggtccaatcacagcgatttgaccttttaacgtttcatcaaaatgatattgacttgttacaattgaaatatcacttaagctgtcatcaatttcattaccaatttttacattaatatttggtgaagatatatcttgtaataattctgcaattctatttgattctatatattgtagaatgggctgaattgaagatacattactttcattcaatgcatcaataagtttaacctttccacccatataaatgctattactttgattagaaatatgattattcatcgtatttatcaatttattgataaatatttcttcctgctctgattgaacaaaagagacaatatcatcttgtaaattctgattaaactcagttagtttgttagtaacaaaatttgatattgtatttagtttatcattactaaacggtatgtctgaagcaagatgtacatgctcaacatgacctgatgaaaatacgataaccattataactaaattaggattagcacgaatcaaatgtacattattgataatatcttgtttatgattaggatgaacaactaaagttgtatattgagatatatttgataattcatctgcaaaatatgtcaatgctgatgatacatcatattgattctcaactaacaattgatttaatcgtcttaatttatttgttttttgatgagatgtttgttcaagtaaacgattgacataatacctaaaacctaattgtgatggcgaacgccctgaagaactatgtgtcttttcgatatagtttaaatcttcaagctgtttcatctcatttctaattgtagcaggactaacattcaagttatgtcgctcaattagtgttttagaaccaacgggttgtccaaaatcaacataatcctcaacaattgcgtttaatatactcaattgcctatctgtaatcatgttttcacctcattagcactcacttatctcaagtgctaattataatttatcaaattggtcaaagtaagtcaatgttaaagactcgaaatttcaattttttttaatcatttattaggaaagcttcaaaaacctcattacctatgactttccctcgctttgttagtgcaatcgcatcgttcttttctacaattaattctttctcttttaaattatttattgtttgaccaaagacactttcaatagattggtcaaacttctttttgaacctactactactcacaccttcatttaaacgcaacccaagaaacatttcttcttccattctctcagtcaaagaaggtttatttgatactaaaattgctttactttctttatttatagctttgatataatgattcactggattgatattcgtataacgcacaccatctacataaccacttgcacctgctccaaatccataatattcctcattaaaccagtaaaccttattatgttctgattcatggccatctaatgcaaaattagatatttcgtattgatggaaaggagattgttctatcttagacatcaacaactgatacatgtcagcacctaaatcctcattaggaagtttaagcaacccttttctatacatattataaaattgggttttaggttcaagtattaagccgtaactcgaaatatgttgaatatccatatctaaagctagatctaaactttgttcaaaatcttcaatcgtctgtttcggtaaatgatacattaaatctaaactgattgatttaatacctgcgtttttagcatttaacaccgaagtgtaaatatcttcagtattgtgcgttctacctaaaacagacaataactccggtttgaatgtttgaacgcccattgaaattctatttactccatatttctctaatagttggactttctctttagttaactcatcaggatttgcttcaaatgtatactcgcctgtgattgtaaacgtatcacgtattgctttaagtaatctttccaactgattaatagaaagggccgttggtgtgccgccacctacatacatggtctttaagttcctatattttgctgtagacatttctgttattagtgcatctaagtactcatctacaggttgattctgtataaaatatttattgaaatcacaatatgtacatattcttacacaaaatggaatatgtatatatgcactttgtaccgtcattttaatgccccgcttctcagactgtttatccaatcggctacatcctgttggactatctgctgttattcttacttttaactttaacgtttaatcaatggttgtctaatatatcgattcattttgatatttattcttgtttagagggagtgagatagaaataataaagaaccactaatgatttattatgtagtggctcttacacattagccagatgtaatatgtccttaaaaataaaattacatgagtaaaactcatgcataagggagtgggacagaaatgatattttcgcaaaatttatttcgttgtcccaccccaacttgcattgtctgtagaaattgggaatccaatttctctgtgttggggcccacaccccaacttgcattgcctgtagaatttcttttcgaaattctctgtgttggggccccattgttataagctcattttaactctgtcgatgactgccaatataacattgtaaagcccaggacgttaatttatcctaggctccctctttttagttattaaactttattcattgtaaattgttaataaattttttaaaaacttattcgtcatccattttcaatacagccaagaaagcatcctgtggaatttcaacattaccaactgctttcatcttagctttacctgctttttgtttttcaagtaatttacgtttacggcttatgtcaccgccataacatttagctaaaacgtttttacccattgatttaatatttgtacgcgctacaattttttgtcctattgcagcctgtacaggtacttcaaattgctgtcttggaattaacgttttaagtttttcaactaatgctttaccacgttcatatgcaaaatctctatgaactatgaagcttagcgcatccactttatcaccgtttaataaaatatccatcttaactaaattactttctttattttcgatgaattcataatcaaatgatgcatatcctttagtattagatttaagttgatcgaagaaatcaaatacaacttcagctaaaggtaattcataaacaatatttacacgaatatcatctaaatagtccatatttataaattgtccacgtttacgttgacataattccattactgcacctacatagtcatttggaaccatcatagttgcacgaacatatggctcaaatattttatcaattttatcacgatctggcatttgtgctgggttatcaaccgtcacttctgaaccgtcccttaaaatacattgataaattacagatggtgctgttgcaattaattcaatgccaaattctctttcaattctttcttgaattatttccatgtgtaacatacctaagaaaccagttctataaccaaaacctaatgcttgtgacgattcaggctcaaattctaatgatgcatcattcaattgtaatttttctaatgcttctcttaaatcattataatttttgttatctattgggaacagtccgcaatataccattggattcattttcttataaccttgcaatggttctgatgcaggtctactagctaatgtgatggtgtcaccaaccctagaatcatcaacatttttaatacttgcaataatataaccaacatcaccaactgttaattcatcaactggaagctgcttaggtgtattaattccaacttctgttacttcgaactctttaccagtggccatcattcgaattttatctccagctttaacaacaccgtctacaattcttatcgatgaaattacccctctatatggatcatactcagaatcaaatattaatgcttttagtggtgcttctgggtcaccatctggagctggcacaacttcaactattttctctagtatctcttcaattccaatgttagatttagcacttgctaaaacaacatcgtcttggtctaaacctatcatatcttcaatttcttgtttcacgcgttcaggttctgcagcaggtaaatcaattttgttaataacaggcaataactctaactcattatctaatgccaaataaacatttgctaatgtttgtgcttcgataccttgagccgcatctactactaaaatcgcaccctcacaagctgccaaagaacgtgacacttcatatgtaaaatcgacgtgtccaggcgtatcgattaaatggaatgtataagtatttccatctttagcttcgtactttaaacgaactgcgtttaatttgattgtaataccacgttctctttctaaatccattgaatctagtaactgatcttgcatatctcttgtttcaactgatttggtattttctaaaattctatcagccaatgtagattttccgtggtcaatatgtgctataatcgagaaattccttatattctctcttctttttaagcgttgctcattatccattttatccttctcactttcataaaataaacccgtattatctttcgcatctttgatataataacgtttttaataggtaaatgcaaacgccataatcttggatgaactttgaaattataacaatctttatttaaatacatacttgcgatatgttaatatgttaattacgtacttataattataaaacgtattgattgtgtttccaacacaatttattaaatctgcaaaattttaagctaaccccatcaaataaatgattgcacaacggttagacttttgttaaaatatttcttgttgtaatcaaataaaattttgataagatgaactcacttttaggaggtgacagaaatggcaaatatcaaatctgcaattaaacgtgtaaaaacaactgaaaaagctgaagcacgcaacatttcacaaaagagtgcaatgcgtacagcagttaaaaacgctaaaacagctgtttcaaataacgctgataataaaaatgaattagtaagcttagcagttaagttagtagacaaagctgctcaaagtaatttaatacattcaaacaaagctgaccgtattaaatcacaattaatgactgcaaataaataatctttttaaataaaagttcaagcgcatgcttgaacttttattttttataaagatagaatgaataattccagtattaactgtttatccatatatgatgatttaagtttataatcagtttccgcacaagcatctacaatattcaataattcatcaagttgataatgtcttacttgtcctaacgctaattttactctgtatggatgcactcctattgttttagcaatttgctgtccactatatcctttttgactcagaatcttacattgataaaataatcggtaattacttgtaattagtgcaagtaatttaattggttcttctttcatagttattaaatcttttactaaatgaattgcttgttctttctttcttttctgaatgtattcagtcagtaaaaatacattttgctctaaacttctattaataatttggttaacatcctgcttattaattgttggtctatcgcctaaaaataaaatcaacttttctatctcttgtgagacaatattaaagttaatacctgtcaactcaataaataaatctaatgcatctcttttgatatctttgaaattctcatttaatttactttgaatccatttttttatttcttcttcagacatttgctctatttttttaagccttgcatgcttttttagagttttagttaacttttttctttcatcaagtttattttgatatatctcaaagacaatcaaattttcgccatcatatttttcaataaattctattaattgatctacattatgagccatatcttttggcgctttttcacctgtaaatatatatgcatttttaaccaaaattgcttttttatctgaaaagaaaggcaatgttaatgtttcttcaacaattggtgcaatctctgtttcgtataaattatatttcacaaagttaaagtcatctctatcacttttcaaaaattgtgatatgatttctgcactttgtttttcaaccaattcaggcacatctccataaatagctacaatattgtcgctcattcattacaccctttcattcgtttgacacatcaatagattatatcatgtttctgtatctataaaccacttgcatttccataagagtttgaatcaacttttaaattatcatctaagtcaattgtaacttgaccgttttgttgactattgtaaatgcgactgcgaatcctttgcaatcgtttaacaacttctatattaggaagatgatacatattgttcttcccagaagaaatcaaacttattttaggcttaatcatctctataaattctttagaactacttgtcttgctcccatgatgtcctacttttaaaatatcaatctccggcaagttatatttttttagtagtaaagattcattatttttactagcatcgcccattaataaaacttttttattttgatatgtaatcatagtaataatcgaatactcatttttatctcggctatttggaataaaactatcaaaaaatagaaaactactatctccaagtttaaaactactaacttgtcttacatccataagtttaatgttgtacttatggcttaatttcgataataacatcaatgtattactactatatcccttattgtatatcactatatgtttaattttaatatgactaataatatattccacttcaccaatatggtcattgtgtggatgtgttaaaattagatactctaattcatttatccctctttcatttagcgttggtaaaatatgatatttagaaattgaataactaggttgtttagtatcatcaatcactttcccacctgtatcaatcaagacattttggttcttaccgccttcatataaaatactgtctccctgccccacatttaacattgtaattttgtgatgtgaatttgttggaaacgttattaataatgtcagaataattatagtccaaaacgtaaccaatatatatttacgtttagccaataaccaaaatatgtaataaacagaaattataaatattataaatatccaatcattaaacttgggaacagaaaaatgtgattgcttaattcttgtgaataggtctagtaaccagtcatgaaaattaaaacttaggtcaaccaagtaatttagcggcgttaatcccacaataaaatgacttgtaataaagaataaaatagatagcggaaacaatataatcgaatagtacggtacaaaaatcaaattagataaaaatcccacccattgaagttgatgaaagtttggaatggcaacgataaatgaagctaattgtgcaataaacgtaattatgaataatgattgtaactttgacaattgctgtaaaaaaggaaaaagtagcataataaaaaatgaaatgatgaatgaaaattgaaatccaatatcataaacaactagtgggtttaaaataaacataattataaatgcaaatgctaatagctgaataccctttattttaatttgcttagtaataagcagtacaagagttgtcattattatagctcttacagcactaggtgcataatttgtgtattgagcatataaagttaatacaatgattgtaattcctttaatgacaaataaaggtaaatttaatcgttttaaaggttggtaaattaagaatacaattgcagctatatgcgagccactaactgccagcaaatgatatatacctatctctttaacacgttccttaaattgctcattaatttcttttacgtcaccagtaatcaatgccataatacgatccggaaacttaatacccgaatcataaattcgattcattataaactgtttatgtttctcaattaaattagaccggttcgattctaggcagctttgtacaactatactttgtaatttaagagttacaaacttattttcattaactttgaattgtcctttaacaatacaattacgactttcaattttctttaaatcaaaattctttttatctgttaaaaagaaaggatatatttcattttttaaactcaacctacctttatatgtgtcactaccttgacgttgaatttggattacttgagcacgctcattaaactgagaattacgttcaatataattgatataattaaatattgcttgttgtgaataatgtaaataccatgaggagaaaatgattaaaaagagagaaataggggcataaacgattttatttttacgataagtaatatacaaaagtaaaatgaaaagaaatgtagagagcactttgctagaattccaaagcactcctacaatcattgataacgcgacatacagcaaaacattaacctttagtcagatatttagcaacatattctggtgaaaatggaatttttttaaattcaataccagattgtttgagtaatttagttgcatattcatggttatgataatcttctgcatagtagatacgctttatacctgcttgaataattgactttgtacaatttaggcatggaaaatgagtaacatagattgttgcaccttcagtagatacaccttgttttgcacattgtaataaagcattcatttctgcatgtatcgttctgatacaatgtccatcttcaattaaacatccttcatctatacaatgcacctcgccagctacagagccattataaccaccagcaataatacgattatccttaacaatcgttgcacctacagataatctttgacaagttgaacgtaatgctagcaaatgactttgtgccataaaatattcttcccatttgattctttccaagatgttcaccttccatacttaaaatttagtaacattttctaataatataagattaatcacaaaaaataaaatttgcaattaaaataatccattatatcgtgaaataagatttcagtttatcaaaagttttacttccaaaaccttttacttttttcaaatcgtcaatttcttgaaatgcaccttgttggttgcgatattcaacaattgcattagctttagcttgccctactccaggaacagacatcaattctgatacagatgcggtatttaaatttactttagtattatttgtgttcccattttttacgtgcacactgtttacttcaatttgtggttcaacattcttttgtcctttatgaggtatgaaaatcattttttgatctgttaatttttcagacaaattaattcgacttacatctgcatcatccaataattgtgctttatcaagtaaatcaactactctatccttagatgtcattttataaacattaggatgtttaacagcaccttttacatcgacatatacaggacctttatttttggaattatctccatctttgacctggacatcttctaatttggacaaactattattttcactagtgctttgtttcagagcagtatctttattttcaaaatttcttgaagtataatcatcttgtctccagaatataaaaccaattaataccataattaaaacaacagcacttataatatataacttccactgagttaaaaaatctttatagcgtaataaaaattgatacaataaaaccactcctcaactttatacacgtctgagcgagtggttttacttttattttttcgcaatgaaaaacaatctttctgtatcttcattatgttcatctatattaaaatcagtaaatgtttcaacatgtttaaaaccgacttgagctaaccaagacaaatatgtcttttcatcaaatgttctctgaaaatgagactcatcaaatcttgaatatgtttcatcttcatgtcgaatgaaaaatgtcatatcatgataaacacttaaaggtaaatctccttgcacagcatcccatgctaaaaaaatgtcccctttatcatcaatataactttgattattaaacaaagtcatcattttataaacagtatgtacatcaaaaataaatacacctgaatcagtcagatgatgataaacattgatgaatgtttcaatcactgcagtttcatcttgcaaataatttagagagtcacaaaaaatagtgatgatatcaaattgttgttgcaaatcaaaagatgtcatatctccttcaagccaatttacatttgctgatttttgagctgcaacagtcaacatatcaacacttaaatccataccagtaacattacctaaagcttctaattgaactgttaaactaccagtaccgcatccaatatctaaaatatttgattcatctttgcagtgattttttacaatttcaaaccatttttcatatggttgatcttgagtcaattgatcgtacactaggctcatttctgcatattgcgacataattaatacgcaacctgaccatatgattctaatggtgcatcttgatataacttttcaatattataataatttctttcgtctttatggaaaacatgtaccacaacatcagctaagtcaattaatatccaacgcgcttcattgtatccttccatacgttttacttctatattttgttcattggctacttctttcaccgctctagcaatcgcttgaacttgtcgttcattatttccgtgcgttacaacaaaataatctgtcatatcgctgatacctttcatttctaaagaaatcgtatcttcgccttttttattgtcaattgcatccacagcaattgctaataattcttgtgaattcatttaatcatcctttattctttcgtcactatagttataataatttaaacagtcaatcgtcttattatataccgtaatatctttctgtattaaaaatagtactgtgcgtttagaaatttcataaattgtcttatctaaactaccttgattgtatgccatatctcgaatatcatcaactcctgggattgttcttccaggttcgatgtaatcagcaataaaaatcagtttttcagtttttgtcatttgttgacgtccagtagtatggtatttgatagccattaatacttcctcatcattgataccatattcatgttccatgattgctgcacacacagggccatgcaatatttcactaccataactcagtagatcattacctaattcgtattgtcgaacaatttgatacattttacctaaatcatcatatttacagaaatcatgtaatacacctgctaattctactttactagtgtctccatcataaatttctgccaatttaatcgctgtttctgcaactcttaaagaatgattataacgtttctctggcagtttctcttttacaagccgttttgctttttcaatgttcatataatccttcccccttaatatagttttcaacggatttaggaacaagaacttggatagatttcccttcactaactctttgtcgaatcattgtcgaacttatatctaccctaggtatctgaattgcaatcatagcattttcaacattttgactatttttgtctcgatttacaactacaaaagtaaccatttcttttaagtattcaatttgataccatttctctagttggttatactgatccgtcccaataacaaagtacaactcactgtctttgtgttgctccttgaatgccttgatcgtgtcataggtataactctgaccaccacgtttaatttcatcgtcgcaaatatctccaaaaccaagctcgtcgataatcatctgtatcattgttaatctgtgctgaacatctataaaattattgtgctttttcaatggagacataaaactaggtaaaaaataaaattcatctggctgtaattcatgaaatacttcgctagctactatcatatgtgcagtatggatagggttaaactgaccgccgtaaagtactatctttttcattattatggcaattcaatttctttattttctttagattctctataaatcactatcatagatccaatcacttgcactaattcactacgcgtagcttcgcttaatgtttcagctaattcttttttatcatcaaagttattttgtagtacatgtactttaatcaattctctgttttctaacgtatcatctatttgtttaatcatattttcgttgataccgccttttccaatttgaaaaatcggatcaatattgtgtgctaaacttcttaagtatcttttttgtttgccagtaagcatatgttattctccttttaattgttgtaaaactgctgttttcatagaattaatatcagcatctttattagtccaaattttaaagctttccgcaccttggtaaacaaacatatctaagccattataaatatggtttcccttgcgctctgcttcctctaaaataggtgttttatacggtatataaacaatatcactcattaaagtattgggagaaagatgttttaaattaataatactttcgttatttccagccatacccgctggtgttgtattaataacgatatcgaattcagctaaatacttttcagcatctgccaatgaaatttggtttatatttaaattccaagattcaaaacgagccatcgttctattcgcaacagttaatttgggctttacaaattttgctaattcataagcaatacctttacttgcaccacctgcgcccaaaattaaaatgtatgcattttctaaatctggataaacgctgtgcaatcctttaacataaccaataccatctgtattataccctatccacttgccatcttttatcaaaacagtgttaactgcacctgcattaatcgcttgttcatcaacataatctaaatacggtatgatacgttctttatgaggaattgtgatattaaagccatctaattcttttttcgaaataatttctttaattaaatgaaaatcttcaattggaatatttaaagcttcataagtatcatctaatcctaaagaattaaaatttgctctatgcataacgggcgacaaggaatgtgaaataggatttccgataactgcaaatttcattttttaaatcaccttataaaatagaatttcttaatacaacatcaacatttttaggaacacgaacgattactttagctcctggtcctatagttataaagcctagaccagagatcataacatcacgtttctctttgcctgtttcaagtctaacagcctttaactcattaagatcaaaattttgtggatttccaggtggcgttaataaatcgccaagttgattacgccataaatcattagccttctccgttttagtacgatgtatattcaagtcattagaaaagaaacaaactaacggacgtttaccacctgatacataatctatgcgcgctagaccgccgaagaataatgtctgcgcctcatttaattgatatacgcgttgttttatttctttcttaggcataataattttcaattctttttcactaactaaatgcgtcatttgatgatcttgaataatacctggtgtatcatacataaatgatgattcatctaaaggaatatctatcatatctaaagttgttccagggaatcttgaagttgttactacatctttttcaccaacactagcttcaatcagtttattaatcaatgtagatttcccaacattcgttgtccctacaatatacacatcttcattttctcgaatattcgcaattgatgataataagtcgtctatgccccagcctttttcagctgaaattaatacgacatcgtcagcttccaaaccatattttcttgctgttcgttttaaccattctttaactcgacgtttattaatttgtttcggcaataaatccaatttatttgctgctaaaatgatttttttgtttccgacaatacgtttaactgcattaataaatgatccttcaaagtcaaatacatccacgacattgacgacaataccctttttatccgcaagtcctgataataattttaaaaagtcttcactttctaatcctacatcttgaacttcgttataatttttcaagcggaaacaacgtctgcaaatcacgtcatcacgaaacatattatgctctggtacaaaaccaggtttatttttatcttcagattgaagtggcgcaccacaaccgatacattttaaaatgtcagacaatcaattttcctcccatgtgatataaccttttttactgaaatgacgtaataatcgtctttcaattaatctattaaccttagtaataaagccatcagttcgtttaactggaacaaccataattgtatatagacctcgacgattaccaccaaatacatcagtaagcatttggtcacctataacaacagtttgatctggtctgatattcatcttagttattgctttatcaaacgctttccccattggctttctcgctttaaaaataaaatcgatgtctaaatgctgactaaaactagcaacacgagactcattattattagacacgattgtaatagtgattcctttttcattagcttccttaaaccatgctttaacacgttctgtaggttctttaacatcccaacctactagcgtattatctaaatctgtaataatacctttaacgcctttgtccactaacttgtctaaatcaatttgaaatattgattgaacatatgaattcggcataaaaaacttgcgaactaaacccatttaactcacctttacctttttataattgagacactaatgcttcaacagtttgacttgatgatacagctgctttttctaaaaatgcttcgaagctcatttccgcttctccatttgctaagtctgaaactgcacgaactacaacaaatggtacattaaattgataacatgtttgtgcaattgcagttgcttccatttcaaccgccatcgcatttggaaatgcttttttaattttttggcgttgttcaacactaccgataaagctatcaccacttacaattaagcctactttagctgttaattgttgttgttgtacaacttgagatactttttctattaaaggtttacttgattgaaatgctaccggcatctgtggtatttgtccatattcataaccaaatgctgttgcatccgcatcatgatattttacatcatcacttataagaacgtcacctacatttaaactttcatctaaagctccagcagaacctgtattaataatgacgtccggtttaaacttattaattaataatgtcgtagaaattgcagcattaacttttccaatgccactttgggtaatcactacttctctatcttttaaaatgccagtataaaatttaacatgtgcaactgaaatttcgcttaattgtgttaatttattttttaatattgttacttcttcttccatggcaccaattataccaatcatcctttgattcacctcttttaaaaaatcctagcatttgttattttatcacattttaatcactacaacgacaagtatcatgattttcattactgtataaaacttttgctttatttttataaaaagctctttcaataacttggtatcataaataattatttttgaactcataacagtgaattcgatgcttctaatttgtctatttttcaaaaactaatcatatcaattacatcaaccaatcgtgtcaagaaactttattaaataacaggaaaatgatatgtttaaaataataatgatgaaataagaggattttacaatggctgaaaataatcaaaatagtctcgtaacaaagatagctacatacggcagttttattgcaattgcgtcgtttgtcattttatttataagtatatttttaaagttttcatttaatatcgagtttatagcaacaattatgaacatatgtcgctacactctaattctaggatttatacttatgtccttacctgatgttgttgataaaaacatcaagaaaattatattcgatgcatttattatcatcgtctttatcttctttttactatagtagttttattttgtaattacacagttaatcatatttgtttcgtatcgaattcctgtgtgcattaaagataattctaatagaaaatagcagtaagacttttctaagtgttagcatccttactgctgttttcatttgtaacaatataatgtcaggtactttatatttcactgtcaaagattattaatgattaacttaattaaattatgatttgaataaatagatatctaaatgcaatttgtctctattgatagttttattatcagcatacatttttaatacctcataaccatactcaccatttaaattataaaaatcatattctacattttgttcatcatcattatgatatttaacataccctttaacaatgtcgccaccttgttcgtacaacttatacttctcattcaaataatttcttaattgaacatctaattcttgaatggtaacaattttcttttttcgtttttactgcagttagttctatttctgtttgatgtccgtcaatccataaattagaaggtatattcttataatcatcttatttattattgtcacttaaagtaacaccaccataactacattgcgttttattggttgctcccccatgacattcatagctatagcttccagcatatatatcgatattcttatttataaatttctttgaaagtgcctcattttcgaattcaactttaaaatcctttttcgaagcaacatttacgaacatgtcatgaaataacaaatcatgcttcaacagtctatcgtttgtgtttttattttcaagctgagttggattgatgaatgacatcttagcattacttagacgctttgaatcaaacttacttttatgatgtaagtctgaatattcgattgcactcgctgaatttgtaaaaattccttctaacaataatattaaaataaatcctgttaaatatttaacttcaaactcccccaaaacaattattaatttacatttgagagcgagacataaatgataaacaggctgggacataaatcaatgttctatgctctacgaagttatattggcagtagttgactgaacgaaaatgcacttgtaacaagcttttttcaattctagtcaggggccccaacacagagaatttcgaaaagaaattctacaggcaatgcaagttggggcggggccccaacatagaagctggcggaaagtcagcttacaataatgtgcaagttgggtgggacgacgataaagaaatactttttctatagaaattagtatttcttatacatgagttttactcatgtattcctatttttaagtacacattagctgtggctaatgtgtaagaaccactacataataaatcattagtggctctttatcatttctgtcccactcccttgagcctacaattttgattatgtatcacgttcataatactttccaatttgaaataccctgttcgcaattattagttgagttatatcaaccaatacagtgtaaacataaaaattccaaaccgtttaacagtatatcagaaaaaatgataatcatttcttttatttttattaaatttcataatgattcatataatattcgcattaaaacatcacaatactgatacacaacaaaaagagcagtacatttgtcatgcaccactctcaacaaatatatttttcaatgaagcaattacgcgatcttacaaatactataagtatagctgaatcacatattatatttattttataatcgaatttagaaattcatcacttatctcataaattgttggtctacttttaattttaactaagtagttatcatattttttaattgtattattaatttttactcttcctactcccaatatgttttctaaatcaattaatgttaatctatttcttttatttccaaacaatttatccattgaaaggagatacaaaaattcataatctatctgtttataatgactagttaaataaagcgttaatttttcagtcgcatccatttttggtattaactcatcaagtattctttcttgtcctgctatcaatagctcaagcattgtgtcaataaattccgtcaaatcaccacaattcaaatgatttgaagcagtcataaacgccttgtaatatttcgatttatttctatttataacatatgaaaatgtcaaagcagtataattatcataataatcactcaagagcttggcaattataaatcttccaactctaccattgccatcataaaaaggatgtatatattcaaacagataatgactagccatgattttgaacggctgaggcgcatcaaaatattttaaaaatgttagcatttcacctatatattcaacaattttggtttcaggttgtaacccaacatgtatatatttattcgttgacccatcatgcacaccgacaaaatttttacgaaatagctctccatctaacttatcttgttcgttaatttcatttgaaactaatttatcataaatcgctctaatgtctcttacattatcaactttaatttttttattaagttctatctctttatattgatccacgaggcctctgaacttaagaaattctgatgcttggttatttaacgcatgtgcaatctcttgtttagtactaaatacattttcaatttcattagtactttgtaattcatcgattaataaatcattaaaatattgttctctagctgcatatggtaaagaattaagtgctctatcaatttttctactattaattgatattaattcttgtttttttgatagatttttagtcaccataaagaatagaggatattccaaatcattaactttttttccattttccataggtatgatattaatattagtattgaaagaagctaaagaattaaatcttttagtatactcttccttcattttactttcattgtgttcatgaaaaatactttttaaagttctgtaacccatttgcagcctcctctactcatttaaaatgtattttttgtccaataaatccattttcattagattagctaaatattatcactttttttctttaaaaactatataaataactattttctcaatcaatagaaaaagatttttcatcacaacaaaaagagcagtacatttgtcatgcaccactctcccttaaaatatatctaattatgctttataaatgaatcaccggaaatcaaaatatatcttgcctaatactaacaacatttacagtgatgctattagtcgaaatgtcttttaaaataactgaagtacttctttgaatgagaatatacctgtcaatattgtaacaagtactgcaacgataccaaagatgaacatccaatttgggtgtttataatcaccaacaattgatttctttttacttgcaatcaaaattgcacctaacgtaataggtaaaatccatccatttatcgcgcctgctataattaaaaggctgattggttttccaataaataagaaaatcattgttgaaataacgataaacacaatcacaattaaattacttctttcgttaagtgatttatgaagtgtttttaaaaatgttgcgcttgtgtatgctgagccaattactgatgacatagctgcagcaaataacacaataccaaaaatattctttccaattggtccaattgcgtgttcaaaaactgacgctggtggattttcagaacttagtgtcacacctgttacaacaactcctaataccgctaggaatagtaacgttctcataatacctgtagttaaaataccagcaattgctgattgatttacaaatggtaaatattgcttacctttaatgccagagtctaatatacgatgtgcacctgcaaaggtaatataaccacctacagttccaccaactaacgtaatgatgggcaagactaatttcattggatgttctggcgcaaatgtatgcacaaaagcatcaccataaggtggattagaaacaaacatcacatatgccacaactaaaatcatcacaataccaagaatcattgaaacaacgtccataattttttggccacttttacttacaaagattaatattgcaaagattgcagtaatagctgcgccccattttacatctaatccaaaaattgcatttaaacctaaaccggcaccagcaatattaccaatattaaaagctagaccaccaaatgcaatcaatattgagataacagtaccaagcccaggaacaactttatttgatatttcttgacctcttaaaccagttacaactaatatgcgccatatattaatttgtgcaccaatgtcaatgatgatagacagtaatatggcaaatgcgaaacttgcaaaaaattgtgatgtaaatactgctgtttgcgttaaaaatgctggcccaattgcagaagttgccatcaaaaatacagaacctaataataaccttttatgattttttgtgaattcaaagtcactttcttttttaagctttaaatttctccccatttttttagccccctataaggattgaatatcaatgccttctttcattaaaatttctctaattttcgaaacaaataataatgcatgttctccatcaccatgcacacaaattgtatctgcttgtaacgttacttccttattgttttttgaaataactttattttccttcaccatctttaaaacctgcttaagtgcttcgtcagtatcagtaatcacagcatcactttcttttctactaacgagctgcccatcatcttcgtatcgtctatcagcaaacacttcagaagctgtaattaatccgacattctttgcttctgaaattagatatgaatttgctaatcctactaacactagtgatggatcaaagtcataaacagcttgtgctataacgtttgctatttctctgtcttttgcacccatctgatacaatgcaccatgcggtttaacatgattaattttaagttgatgaatgcgacaaaacccttgtaatgcacctaattgataaatcatcaaattataaatctcgtcgttagagatatctatatttcgtctgccaaagcctttcaaatcaggtaaaccaggatgtgcacctactgcaacattatgtgctttggcaagttttaccgtttcattcattacattttcatcaccagcgtgaaaaccacaagcaacattcgcacttgtaattaacggaataatttgatgatcaccaccaaaggaataatttccaaatgcttcgcctaaatcacaattcaaatcaactcgcattataattccacccctttaacaatttgatgtttttctaaaaatttaatatcaacatcttttgcatctccatcacgatatagtggataatttaaaactgcatataaaaaatcggcagttgtagaaaatccatctatcaccatttcatctaaggtgactttcaacttatcaattgctgaagctctatcatgagattttacaattactttagctactaaagaatcataatatggtgaaacttgataaccgtgatatagtaaagaatcgactcgcacattaaagccttgaggtaaatgtaacgctgtcactttacctggtgttggttgaaatttcttttcaggattttcggcatttattctcgcttctatcacatgaccattaaattgaatatcgctttgtgaaaaaggtaaatgattatgttccaataaatacagttgtgctgcaaccaaatcacgttctgctcgcatctctgtaacagtatgttcaacttgtattcgagcattcatttcaataaagtaatgtgcggtatcagttactaaaaattcaatcgtacctgcacttctataatttgctgcacgtgcaactttaacagcatcgttacatatttgttgtcgtcgttcttcagttaatgctgcacaaggagattcttcgattaatttttgatttttacgttgtacagaacaatcacgttcccctaaatgtacataattatcctgcccatctcccataacttgaacttcaacatgttttgcaacaggtataaaagcctcaacataaacacgatcatcatcaaagtatttttttccttcacttttagcttctttaaatgccttttctaaatcttcagctttctttacaatacgtatacctttaccaccaccgccactggcagctttgataacaactggataaccgatgtctttggcaagattctcaatttcagacacatgattcacagcaccatttgatcctggaatcacaggaacacctgcatgatgaactgtttgtcttgctgttattttatcccccatcatttccatcgtttttttagtaggccctataaacgctatgccttgttcctcaacggtttgagcaaattttgttgattctgataaaaagccatatcctgggtgaattgcattagcaccagtgatttgtgcagcagatatgatgcggtcaatatttaaataactatctaaagcattagcttccccaatacatatagcttgatctgctaaatgtacatgcaagctttgctcgtccccttttgcataaactgctacagtttcaatcccatattctctgcaagctcttataatccttacagcaatttcacctctgttcgcaattaaacaacgaagcatttacttaccccctttacttaatacgtaccaaaacttggtcgtattcaacatttgtgccatgatcagctactatttcagtaatttctccagcaacatctgttgttacctcgtttaatactttcatcgcttcaacatatcctataatatctcccttgttaactttgtcaccgacattcacaattggttcagttaattctttactatcttgtaaaaagaatgtacctaccattggtgatttaatgtcatgataatcatttgtcgaaacatcggagttatcattcgcttttgaagctgtcaaatcattattgttcatactttgatttgattgattactgtgtgcagccaaatgattcgagtcagtgaagtcaatttctatttcatcttcaaaatttttatatttaaatttcttaacatcattttccttcactaatttgattatttgttcgattttttcaatattcattttacaaatccccttttaaaattgttgataattttttcgaagtatgtcgcaagctagatgtatcaaaaattggagtcttttgatgactcttaagaatttcattaaacagagacatttgttcccgattcttatctacagcttcttggaatgatatccatttaaattgaattgtatcttttggtttcatctgtgctaactttggcagatcaaatttgcatacagttgcaattttggtataaccacctatcgtttgtttatcattaagcagaataataggttgaccatcatttggtacttgaacactaccaagagcaaccggttcagaaatgatatctgcttgattaattggtgcaacgctgtcaccttccaaacgatagcccatacggtctgattgttcagtaattaaatatggatgatttacaattttcgctctagcctcttcagaaaatgcctcgaattgaggtccttgaagaatgtgtataatattattttctggcaataaatcgtcctgtaaatgaatagtctttccaatgttttctttaaagtcattatttattttcactgttattacatcattagctaataactttctacctttgaatcctcctatactgcttcgggtatgtgttgcataactttcagcaatagaaggtacgttgatagaatgaccaaaagtaagataaccgcgtacacctttggttatagcacctatttttaaaatgtcacctttctcagctaatatgacagaattcattgatatagttttattatttagcgaagcattaatactaccaccggttataacaaatgtattttgcgtattaaattgaatggtaggaccaatcaaagtatattcaatcgctggaccatcattgttaattaatgactgcgcaaccttaaaactaaattgatccatggcacctgcgcctgaaaatccaatatgttcataacctattcttcctagatcttgtaccgttgaaaagagacctggttgtaaaatcttaattgacattttcaatcaccacccagtcatcaacattaaagttgccatctgatatatctctttcgatttgtataaatttctgttcatctattgcataaaattgtatccattctcctgcttcgtacattgacattggttcacgctcgctgctaaatacttttaacggtgtgcgtccaataatttgccatccgccaggagaatctgatggatatagtcctgtttgattattcgcaatacctacagaacctgcatgaatttttaaccttggctgattacgtctaggtgtatgtagttgttcatcaagtccgcctaagtatggaaatcctggcataaatcctagcatatatattaaataaggtttacttgtatgtttttcaataacttgctcaacagttattcgattatgctttgctacttcttcaatatctggtccatatgtaccaccatattgaacaggtattttaataatacgattggtttgatccacagcatgaacatttttttcattaaatttgttaagttctaaattttcaattaatttagaagatgttatagcttgttcatcaaaatatattagaactgctcgatacgaagggacaatatcttgaatttctaatatttctttttctcgtatccaccgtaccattgctgtgacattacgatatgtctcttcggatattttattttcaaaataaatcataattgtctgctcgttaataaatcttacatccactttaaatccccctttgtattgcaataaaccagtattgaataccttttcattgtatcattgagaagcacaagttgtttaataagtaattcaaatcgcatacaataacaaatgataatcaatttgttttctcggaaatattttgcttttttaaaatggagtagttaatattgtaactcttacactaatttaggttctgctatcattcggtctgatggaaaatttttacttttcatctgtccgattttttgattttgaatataaaaaagcacgaccgaagtatcattaacacacttcaatcgcgcaattaaacaatctatttgatcatttattggatattaacaatttttacgttcatttcgccaccattaggtagtggaacacgaacttcatcatctaaacctttaccaattaacgctttagccattggtgattcatttgaaatcttaccattaaatgcatctgattcagctgaaccaacgatttgataactttcctcttcatcacctggtaattctacaaacgttactgttttaccaattttaacaacgttgttatctccagtatcttcaatgattaatgcatttcttaacatatgctcaattctttgaatatcttgttcgatgaatccttgttcatcttttgctgcatcatactcagagttctctgataagtcaccaaatgaacgtgcaactttaattttctctacaacttcaggacgcttaactgtttttaattcttcaagttcacgctctaatttttcaaaaccttcttgagtcattggatattgcttttgattttccatattgtcatcttcctttactgaattatactattgcttgctaactaaagactgaatttttgttgtcataatatctattgcaactttattgctcccaccttcaggaataattatatcagcatatttcttagtcggttcaataaattggtcatgcataggtctaacaacacttaaatattgattgataacagagtccattgaacgcccacgctctttagtatctcgtgttaaacggcgtaatattctcaagtctgcatctgtatcaacatatattttaacatccatcatatcacgtaataccttattttctaaagcgaaaataccttctacgataataacatctttaggtttaaaatcaatggtaatgtcacttcttgtatgactagcataatcatatgtcggtacttctactgctttaccatttttcaagtctttaagattttcaattaataaatcattatcgaatgcaaatggatggtcataattggtttctaggcgctcgtcgaaagtcaagtgcttttgatctttataatagtaatcttgagcaagtaaagcgacactatgaccttctaagtttttcataatttcgttagttacagttgtttttcctgagccagatccaccagctatgccaatgattgtagtagctttcattagccaatttcctttctcatcatgttgtttggatatatcgggcgatccactttaatttgaacgatttgtaatggatggcgcgccgcgtctaagctgttaccttcttcatcataaattgcttctactacttgtgtaaatgtttcaatttctggaccaaagaattctatttcttgacctggtttaaagttatttcgttgttgaatagtcgcaatttttgtatcttcattatagtctaataccaaaccacaaaaatcaaatggtgattttttagattgttgttgaccaaacatctgttcttcataaccaggtgttccctcaaagaatgctggtgcagtgtctctatttgcacatttatctaactcaattaaccattccggattaatcttaaagttgtcaggatctgccgcatacgcatcaatgactttacgatatactgagacaactgttgcaatataatgaattgacttcatacgtccttcaatttttaatgagtccacaccaatatccatcatttgaggaattgattcgattaattttaaatctttaggactcatcgcaaacggtgtaacttcaccttgattataaaatacatcaagttcaccattatcatcaacttctaataattcataatcccaacggcaactttgacagcaaccgcctctgttggaatcccttgcagtcatatgattacttaatgtacatctacctgaataggcgatacacatagcaccatgaataaatgcttcgatttcaatatctactttttccttcatttcacgcatttccatcgcgccggtctcacgtgctaatacaacacgatccaatccttcttctttccaatattctacagctttgtaattagaaagtgattgttgagtagataaatgaatttcaagttttggcgcaacttctttacatgtttcgataattaaaggatctgcaacaatgatacctgtcgcaccagtcttttccaaattacgcaaatatgattctagaccttcaatattctcatcatgtgcaataatatttgtcgtaacataaattttggcaccgtaacggttcgcaaattcaacaccttcagctatttcttccatcgtgaaattatcagcatttgaacgtaatccatattcttgaccacctaaaaatacggcatcagcgccataatgtactgctatttttaacttttctaagtttccagcaggtgctaataattctggtttcttcataactgttttaggagttgatttaatctcttctattgtcttcatgattaacctccttaatatactgtttgtttatataagaaaccttcgtcaaatggtcgatgatcaggttgaatttcttcaattggatcaatcaacataaatttctcatcttcatagatttcaggatcttcattgtacaaatctatcgcttgacgatactgttccgttaccacattaatatattcttccgtttgtagaataccatcgattttaaatgaatctatacccgcctcaaaaaatggtgctaattcttcaattaaacaaatgtcgtttggtgacataatgtgcgtaccattgtaatcttcgtaaactgggtaattattttgtctttcttcatcataaagtaataaagattgttcatcattgcgacgttcaattttcatttggcgatcttggaacgtataataattgcctagtagcatacgctttgattggaacatacaagtcattccttgaacttgcacctcaatttccacatttgaattttcttttatattaataatttcatccaaattcagctcacgtgctaagacagctcttgatgcgcctcttttaccccagtaattacattgaaaatgattagttactaacgtctctgcattccaatgaattggtattggattttcttgcgccttcacatacattactactgctggatccccgaaaataattctgtcaactcgtatttcatgtaaaaaattaatataatcttctacagcatctaaatgataattatgaaataatccattcactgccgcatatacttttttatcgtttttgtgagctaatgcgacagcctctgtcatttgttgtctattgaattcccctggaagtcttaaaccaaacttttgctcgccaattacaaaagcatctgcacctaaatcaataagtgtttccatatggcttaatgacttgggtgtgacaagtaattctgtcatagtcattctcctttaattgaaatcgctaatccatcgtctatatttaaaaaattcgttgtatatcctggttgctttattaaccactcattataatcttgaacctttttaaccatttgtcttacatttctcgatctaacaatcccaatatccgatacaaaaccgtgatataaaacattatctgtaattacgagaccttggtgctttaaaagtggtgtatatatttcaaaaaatttctttgattgcgcttttgctgcatcaataaatatcatatcataaactttgtcatttacattttcaaattgctctaaagcattaccttcaataattcgaacctggttttcaaaatgataagtagctaaattttgtttagcatattgaatcatcgtttcattacgctctatcgttgtgacatgaatgtcatcagatatagaagcgaattgcatagaactatagccgattgctgtaccaatttctaaaatatttttaacattattcatacgaattaattgcttaattaaatctaatgttaaacgatctacaattggcacttcatttccctcggcaaattcacgcaaaacttcgattgaactattttgatgttgatgtaaatctattaaatattttttatttaggtcatccatgttttaaacttcctttatgtaaaataagtcaatatgattatgacaataaaataaatcagccttcacaattgattataattttgccaaccaattaaatgactgatttcttgttagacgcaaagctattttatttatagaagcgaatcattcatataaaatttaactttagatattttaccatattttcaataaaattataagcgttaattatttatacattgcttgacttaaaaaaatactcttgcctacccatcttaaggttagcaagagtaaaatctttttaattattcttccatttcagtatttacaacttcttcaatcatgtcccattcttcatcagtttcgattggtactaacttaccaccgtcacctgactcatctggttcattgatcattggtacaagctcaatcatatcgtcttcatctgattgagcaccttcttcagctaagataacatactcttttttgaattcaggatgataaaattctaaaacttttcggtataaaacttcatttccctcttcatcgaataaagttaataattcttcttcgttattaatttctagttgtgaatcatgattatgttcagtcatagtaaaatctccttttaatgtagtgaatctaaatagccttgtaaaataaataccgctgccattttatcaatcacttgttttcttttttgtcttgaaacatctgcttctaataatgatcgttcagcagccattgtgcttaatctttcatcccacatcacaatctcaatagaaggataagcttctaataatttttctttatatgttaacgaagcttcgcctcgaaatcctattgaattattcatgtttttaggtagtcctattacgactgtacccacattatgttttttaataatgtctactaattggtcaatacctaattcattattttcttcattgattcggagtgtgtctaatccttgtgccgtccaacccattatatcactaattgcaattcctaccgttctactaccgacatcgagtcctaaaattttatgttgtaacataaattatttattttgctcttttaaatagtaagaaacaagttcttccataataacatctctatcaatatgacgaatttgatttcttgcttcattctggcgtggaatatacgcagggtcacctgataataaataacctacaatttggtttacggcattatatcctcgttcatctaatgttcgataaacattatttaaaacatctcttacatcttgcgttggaagttcttcatagtcgaatttcattgttttatcaaagttttccatttgcgacactcctttaattacaaatataactcactatcatcatacaatattatggctttaaattatagatttttaatgtaatctttaataaagcttaatgattttgagatattttcaggttgtgtaccgccaccttgagccatatctggacgaccgccacctttaccaccaacgattggtgccatttgtttgataagatcaccggctttaacgttatttgttaaagatttagggacagttgcaaccatcgatactttatcatcaacattacttgcaagaatgataattgtatcttgtagtttagatttaaaatcatccattgtcgagcgaattgctttcgcatttggtacatccacttcagtaaccaatactttatagccattgatttcttcaacttgatcttcaatattacccattttaagtgatgtgatttctttgtcacgttgctctaattgttttaataatgctttttcttcatcttgtaattgtgttaacttttcgactacttgatcatcagatttcactttcatctgtgatttcatcgtattaaatttctcttgaatatcttctaaatataagaaagctgctttacctgttaatgcttcaatacgacgcacaccagctcctgtacctgactcacttactattttgaataagccaatttcagaagtattgcggacatgaataccaccacataattcaattgaaaatggtgccatatttactacacgcacaacatcaccatatttttcaccgaataatgccattgcgcccatttctttagctgaagcaatatccatttcttgaatgttaacgtcaatacctttccaaatttcttcatttactaagcgttcaacttgatcaatttcatcattagtcattggaccaaaatgagagaaatcaaaacgtaaacgatctgcttctactagtgaaccagcttggttaacatgatcacccagtactgatttcaacgctgcatgtaataaatgtgttgcactatggttcttttgaatgtcacgtcgatcattttggttcacttcagcagacactgtagcgccaacatttacttggccaaattgtactactcctttatgcaagttttgaccatttggtgctttggttacttcactaacagcaatttcaaaattgtcattataaacaatacctgtatccgcaacttgtccaccactgactgcataaaatggtgtttccgttaacatgaagtatactgtttcacccgcttcaacttgtgaaacttcttcaccattatatatcaagtgtgttagtgttgtttgagctgtcgcagtatcataaccaacaaaagtacttgcagatgtaatatttttcaatacttcactttgaacttgcattgattgagaattttgacgtgcttgacgtgcacgatcacgttgttgttgcatttctgactcaaatgttgtcatatcaactttcaatcctgcttgcactgctatttcttcagttaattcaattgggaacccgtacgtatcatacaatttaaatgcatctttcccattaatttcatttgttgtcgctttagcttttttaattaattcatttaaaatcgctaaaccatcttctaatgtttcatggaatcgttcttcttcagactttataacacgcttaatgaaatctgctttttccttaacatttggataatatggttccataatgtctgcaacaatatcaacaagtttgtacataaatggctcattgattcctaacgtttgactaaaacgaacggcacgacgtaacaatcgacgtaatacatatcctctaccttcattggcaggtaatgcaccatcagaaattgcaaatgcaatcgtacgaatgtggtcagcaattactttaaatgccacatcttgttcgttgtttactaaatattgtttacctgatactttttcgatttcattcattataggcataaataaatctgtttcatagttagtacgtacattttgagaaactgaggccatacgctcaagccccatgccggtatcaatatttttattaggtaatggtgtgtaactatgatctttattatgattgaattcactaaatactaagttccatacttcaagatagcgttcattttctccacctggatacatttcttctgccggatcgtcttgtccatatgcttctccgcgatcatagaaaatctcagtgttcggtcctgaaggcccttcaccaatatcccagaagttaccttcaatgcgaataatacgactttcttcaagcccaatatctttatgccaaatgttatatgcttccatatcttccggatgaatcgtaacgtacaatttatctggctccatacccatccatttatcactcgttaaaaattcccaagcaaattcaatcgcttcttgtttaaaataatcaccaattgagaagttacctaacatttcaaagaatgtatggtgacgcgctgtgaaaccaacattttcaatatcatttgtacgaatagctttttgagagtttacaattcttggctttttaggtgtttcacgtccatcaaaatatttctttaatgttgctacacctgaattaatccataataatgtatcatcatcaattggcactaatggtgcagaaggttcaaccatatgtcctttttcaacaaagaaatctagatatttttgtctaatttcactcgcttttaactttttcatcttttacacatcctatttactgtttttaaattaccattccataaaaattgatgacacagatagtcgatttgaaaaactagtataaatcaatatcattttttattattaaaaaataaaaaacgcccatcctcaaaagggacgaacgttatcgcggtaccaccctagttataaatgcaattcaacacatttatcactttaaatcgactatacagttgtgcataaagtagcgttcactaatgtttgttgtacttttcaccaaccagtacatctctgataaacaaatcattaactactcatctttatacgaatttaattctattttagttacatttacgcttgttgtcaacgttctataaagtcatacggcgtgatttctcccatattaatcattgggtcaattttaaacattgtagcttccgttaatacatttatatctgtttttgttgaatcagacgtaacttctccactatcattcgatgacattggcgcttctacttgatcatctattgtcgtttgtgaagctcctgtatcattagttgctgtgttttccagcatttcttcatcttctgaattaaaataatttttcaacaatgtacataattgtgttaaacgcgcttgaccatttgtttttaatccaatatcaaatgcttctggatcaccaagtagaactaaactcgttttcgctctagttaaaccagtatataatatcggtctttgtaacattctaaaatactgtttaacaataggcatgataacaataggaaattctgaaccttgtgatttatggattgatgtacaataagcatgtgttaattccatcatatcttgtttcgtaaatgtaatttcattaccttcaaaatccacaacaagtacatctttattaagggcattttctttcgcccaaaaaataccaacaataactcctatgtcaccattgaatatgttatcatttggcctattaacaagttgtaatactttgtcaccttttctaaagactacatcaccaaactcaatttctcgtgtgtctttctttttagggtttaaaatatcttgtaaaacttgatttaaacgtttaataccggcatttcctttatacattggtgcaagcacttgaatatcagccatagtataccctttattaacagcactagtaactaccttctcaacaactgttggtatttggtttgcctgacagttaataaaacttctatcatgaaaacgctgtgtaatatcaattttctgacccaatttcattcgatgtgctaattctataatgcttgaaccatcttgttgacgatatacttcagtcagattaactcgtggtatagctttcgattcaattaaatctttaaatacttgaccaggacctacagaaggcaattggtcctcatcacctacaaatatcaattgtgcatctaaaggaactgcacttaaaaattggtgaaacaaccaagtatctaccatagacatctcatcaatgattatgagtcgtgcgtttatttcattttctaatatatcctctggctttgtgtcttgattccaacctattaaacgatgaatcgtcattgcttctaatccagttgactcttgtagtctcttagacgctcttcctgttggcgctgctaatacaactggataatcatcattgacataatcatcataatctaatgataagccatgaatctcagcatataattctacaatacctttaattactgtcgtctttcctgttcccggtccaccggttaatagcatcaccttagaattgatagccgtttgcaaagcttctttttgtgaagctgcatagttcacttgattcgcatcttctatttcaccaatatgcatttgtaaatctgactgttcaatttccgtaagtttatttgtatgcgtctttattctgaataagttttgaacacttttgatttcagaataatacaaacttggaattgcaacttgttcattgtcaataattagtcgtttttcctcatttaagtattgcaacatttcgtctaatttttcaggttcgatgacctcttcatcttgataatttaatacatcaaccgttaaatctataacaacattgataggcaaatatgtatgtccctgtttaatacattcttcttctaacgtatagagcaacgcagcttttaatcgttcattatcgttataagcgataccaatatttctagcaagttgatctgctttattaaaaccaatacctttaatatcataaatcaattgatatggatttcgatctaaaatagtcagtgtatcgccgagataaaactgataaattgccattgaaagtttaggaccaaaccctaaatcatgtaaacgaatcattattttttcagattcttgatttgctgaaatttgttctgcaatttgtttctgtttctttttagataatcccgaaactttttctagcactgaatggtcatctaatatatcatttatcgcattgtcacctaatgtattaacaatattttgagctgtctttttacctacacctttaaacaaatcactagataaataacttataattgcttctttcgtttgtggcatttctttttcaaaagtctctgcttttaattgtttaccataacgtggatgatcaacaacttgccctttaaatgtgtagacatcgccttcaacaatattcggaagaaaccctacaacagttggcattgtatcaaagtcttcatttgtttcaatagtatctactttaagcactgtataaaaattatcactgttttgaaacaatatcgcttcaacagtacctttgatcattgaataatcaaatagtgtagggtctgacatgttactcctcctctttcattttagtgaatgttttcagcgcatgctgacttaataagtgtttagggtcgatagtcacagcttctttaaaatgagttattgcttcatcaatatcttcatttttcataaataacgctaagcccaaattgtatcttgcatcaacatgatttttatcaatcgttaatacatgtttaagttgagttatggcttcattaaacatttctaattgacataatacaagaccatattgaaattgaacttctgcatctttgtctttatctagttccgcagcagtcattaaatacggcaatgccagcttaaatgattctaactgattaaacgccataccgatcatataattacaatcaacttgttcaatctctgtttgtaatgcttgttgatataatttaatagcttcttgataacgttgctgattataatatacatttgctagattataaaatacgacgccattcttcggatctattgttaaagctttttggaaaaaacgctctgccttttcaatctcattcgcatcagcaagtacgataccagcattaatataattttcaataattgtaggatcttcttcgatatttccgaacaatgcttgtaacgcttcttctatttttccattttgtatgtattgataaattgtttgttgatctatcatttacgaacctcatttctcatcaattataacatcttgataaattgtatgtctcgaatcacttaacaacgaataaaatataatctaatatcattttcattcatgaaaaagcgggaatggaatagaaatgctaaagaaccattaacggtttattatgtaatggttcttccacattagccaccactattatgtacttaaaaataggaatacataattagattcatgcatagggagtgggacagaaatgatattttaacaaaattaaattcgttatccccaactggcattgcctgtagaatttctttacgaaattctctgtgttggggccccatccccaacttgcacattattgaaagctgacttttggtcagcttctatgttgggggccccgtccccaacttccattgcctgttgaaattagggttccaatttctctgtgttggggccccgccaacttccattgcctgttgaaattggggttccaatttctctatgttggggccccgtccccaacttccattgcctgtagaatttctttacgaaattctctatgttggggccccgccaatataacattgtagagcctaggacattgtgatgtcccagactctatcatcatgaattattctcatcaaaaactgtctttcgtcattttcgacgttgaaacttcaaataagtaatttattgttgccattgtttatacaacataatttaattgaccttcatttttgaacacatcgtcaattgttgcaccaccaagacacacatcaccttgataaaaaacaactgcttgtccaggtgtgattgctcttactggctcagcaaaagtaacacgtagtgcatggtcgttttcacgtttcacaaaaactttcgtatctttttggcgatatctaaatttagctgtacattcaaaaccttgatctaagtcattatcttctggatttacaaatgaatagtctgaagcaattaagtaatcactgtataatgcatcgtgatggaatccttgttctacatataaaacattatcttttaggtttttaccgacaacaaaccaaggatcgccatctccacctatacctaatccatgtctttgtcctattgtgtaatacatcaaaccactatgtttacccattttcttaccatcaagtgttatcatatcacccggttgtgcaggtaaatattgtgataaaaatgttttaaagtttttttcgccgataaaacaaatgcctgtagaatcttttttcttagcagtaacaagtccttgttcttcagcaattcgacgcacttcactcttttcgatgtcgccaattgggaacatcacttttgaaagttgttgttgagataattgattcaagaagtatgtttgatctttattattatctacaccacgtaacatttcaacatgaccatcttcatgacgatgtatgcgtgcgtaatgtcctgttgctacataatctgcacctaaattcatcgcatgatctaaaaaggctttaaacttaatttctttattacacataacgtctggatttggagtacgaccttttttgtattcatctaagaaatacgtaaagactttatcccaatattctttttcaaaattaacagcgtaatatggaatgccaatttgattacacacttcaataacatcgttgtaatcttcagttgcagtacatacgccattttcgtcagtgtcatcccagtttttcataaatatgccaatgacatcataaccttgttcttttaagacgtgggctgttacagaactatctacaccgcctgacataccaacgacaacacgtatatctttatttgacaattatgactcctccttaaatttaaaatatattttatgaatttcagctacaattgcattaatttcattttcagtagtcaattcgttaaaactaaatcgaatcgaatgatttgatcgctcctcatcttcgaacattgcatctaaaacatgcgacggttgtgtagagcctgctgtacatgcagatccagacgacacatagatttgtgccatatccaacaatgttaacatcatttcaacttcaacaaacggaaaatatagatttacaatatggcctgtagcatccgtcattgaaccatttaattcaaatggaatcgctctttcttgtaatttaactaaaaattgttcttttaaattcattaaatgaatattgttatcgtctcgattcttttctgctaattgtaatgctttagccatcccgacaatttgtgcaagattttcagtacctgcacggcgtttcaattcttgttcaccgccaagttgaggataatctaatgtgacatggtctttaactaataatgcaccgacaccttttggtccgccaaacttatgtgcagtaatactcattgcgtcgatctcaaattcgtcaaacttaacatcaagatgtccaattgcttgaaccgcatcaacatggaaatatgcatttgtctcagcaataatatcttgaatatcataaatttgttgcactgtgccaacttcattatttacaaacataatagatactaaaatcgtcttatctgtaattgtttcttcaagttgatctaaatcaatagcacctgtatcatcaacatctagatatgttacatcaaaaccttctcgctctaattgttcaaaaacatgtaacacagaatgatgttcaatcttcgatgtgataatgtgattacccaattgttcatttgcttttactatgcctttaattgccgtattattcgattctgttgcaccactcgtaaatataatttcatgtgtatctgcaccaagtaattgtgcaatttgacgtcttgactcatctaaatatttacgcgcatctcttcccttagcatgtattgatgatggattaccataatgcgaattgtaaatcatcatcatcgcatctactacttcaggttttactggtgtggtcgcagcataatctgcataaatttccatgtttggacactcctcacaattttatcaatgttccaataatagcaccttacatactatttttctacttttctgtttaactttatttataatgtttttaattatattttaccattttctacacatgcttttcgataggcttttttaagtttatcgctttattcttgtcttttttataaattttagtatttgcagatattttttcatttgtaaaatgtaacgtactattattttggttatgagcaatttaatatttatctggttattcgattggtatacttcttatatcataaaaaaggaaggacgatataaaaatggcgattaaatattcagcattaaaccttgtccctattcgagaaggtgacgatgaacgaacagcaattaatgatatggttaagctcgcacaacatttagatgaattatcgtatgaaagatattggattgctgaacaccataacgctcccaacctagtaagttcagcaactgctttattgattcaacatacgttagaacatacgaaacacatacgtgtaggttctggaggaatcatgttacctaaccatgctccattaatcgttgcggaacaattcggcacgatggcaacattatttccaaatcgtgtcgatttaggattaggacgtgcacctggaacagatatgatgaccgcaagtgcattaagacgagatcaacatgatggtgtttataaatttccagaagaagtttcattattacaacaatatttcggcccagctcaccaacaagcatatgttcgtgcttatccagcagtaggtaaaaatgtgcctttatacattcttggttcttcaacagattctgcacatttagctgctcgcaaagggcttccatatgtgttcgctggacattttgcacctcaacaaatgaaagaagctatcgaaatttacaaaacgttatttgaaccttctgatgtattagacgaaccttatgttattgtatgtttaaatacaatcgttgctgaaaatgatgacgaagcacaatatttagcttcatctatggcacaagtaatggttagtatcactcgtggcagaatgcagcccgttcaaccgccaacacatgatctacaaaatatattaacgccgagagaatatgcgatggctatggaaagacagaaaatatcattaataggttcagaaaatactgttcaacaaaaaattcaagattttatggaaacttatggtgaagtcaacgaaattatggcaataagttatatttatgataaagatatgcaattagactcttatcgtcggttcaagaatgttataaatcagataaatgaaaaaaacactttataatgtgataaataaactaagtgaaagtatgtatccataatattaataaaaataaacagtaacagcattttgaataaaagatgtctttattgttcaatcatttgttttagtaatgattcaaattcacttaaaattctaaagcaaatatgaaagcgccccttcaactttacactgtgttagtgtttatttgatggggcgctttcaaaatattgaaaagcatatccaaaatttaaagaaatttatttctctttatcttcattttcttttttctcttcgttattcgatcctgtatattcatttatcttatcttttacatttttaacttgttcattatcgctatttttaaatttttctactgcgtctttagctttatccataaaactcatattaatcgctcctcttatatttgattagtttaattgaacttattttttaagtttatcaattgcatcagttattttgtttttagcattttcaacaacttcttttgctttaccagtcgctttatcttgctgaccttctttttctaattctttgttatcagtaacgttacctactgtttctttaacatttcctttaaattgatcgaacttactttcgtctgccatagtgaaacctccttggatgtatatatttatataccactaaggaggttcgccaaacattataatatgaagtttttatgttatagtatagtatttatacgattaaatataaaacatgtatccgtctaaatcttcacttgtatctacatattccgctaaatatttcaatgttgtattatctaaaacatctctcactgcatctctcatgcgaatccatagttgtttttgcgcaggtggttctgattcaatactttcaacaaatgtaattggaccttctaacagtcttataatatcccctgctgagatttcttccgctggtactcttaattggtatccacctttagcaccgcgtacacttcgaattaaccccgcatttcttaaaggacctacaagctgttctaaatataaatcactcaaattattttcttcagcaattgactttaatgatatacatccttgcccctcttttttagcaagagaaatcatcaatgtaagtccatatctccctttagtagaaattttcattgtataacctcacttaattcgaatattgatattcccattttagcattttttgagttaagatagtataagaaaggtgtgacaaatgtgagtacagaaccattagcatcgagaatgcgcccaaaaaatatagatgaaatcatttcccaacaacatttagttggaccaaaaggcattatcagaagaatggttgacacaaaaaaattaacttcaatgattttttatggtccacctggtataggcaaaacaagtattgccaaagcaatttcgggcagtacgcaatataaattcagacaattgaatgctgtaactaacactaaaaaagatatgcaacttgttgttgaagaagctaaaatgtctggtcaagttatcttgttgttagatgaaatacatcgactagataaagctaaacaagactttttattacctcatttagaaaatggcaaaatcgtcttgattggtgctacaacttcaaatccttatcatgctatcaatccagcgattcgttcaagagcgcaaattttcgagttatatcctttaaatgacgaagatgtgcgccaagcgttaactcgtgcaatagaagatgatgagaatggtttgaaaacatatcaacccaaaattgatgaagatgccatgacctacttttctacacaaagccaaggtgatgttcgtaatgcgttaaatgcattggaattagctgtattaagcgcagataatgacaaagacggttatcgacatgttacattgcaagatgctaaagactgtttacaaaaaggtgcatttgtaagtgataaggatggtgacatgcattacgatgttatgagcgctttccaaaaatctatccgtggtagcgacgtcaatgccgctttacattatttagcacgattaattgaagctggagatttacctacaatagttcgacgattacttgtaattagctatgaggatataggcttagcctcacctaatgctggtcagagaacacttgctgctattgaatcagcagaacgtctaggtttaccagaagctagaattccactaagccaagcagtaatcgaactatgcttatcacctaagtcaaattcagcaatgagtgccattgatagtgcattgtccgatattagaaacggtcatgtgggtcaaattccaaatcatttaaaagatggacattatcaaggtgctaaagatctaggccgatctattggttacaaatatccacaccaatatgttaatggctatgtttcacagcaatatttacctgataaacttaaaaacaaaatttattatgaaccaaaaacgacatctaaaagtgaacaacaactcaaagaaatatataacaacttacttaaacaaaggccgtaaaaataagattaaatcgattacctttgatattttagctataatcaaatcaaaactgactagtacacgaggcatattctactatgcttgcgaactagtcagttttagttttatggtgtggttacacttgccttacgttgaaaattatgactttcaaaatgaattattgccctttgtctttaatgcgacgaactggaatatcttttaatacgtcattcaccacataactagcacaaattaatccaacaacacttggcacaaaggcatttgaagaaggtggcatttgtccttttcgattgatagcatttttatctccaactatatcttttacatcttctcttatgacaattggactttcatctgaaaatacaactggaatccctttacgaattcctagttttttcaatttttgacgaataattttggccattggatcggtatgtgttttagagatatctgaaattgtaaaacgtgttggatctgttttatttgcagcacccatactggaaatcactttaatccctcggtcaagacactctttcattaagtgtactttgtacattattgtatcacttgcatctacaaaataatctatatcgtagttatcgaaaatttcttcatatgtctcttctgtataaaacatatgtaagggcgtgactttacaatctggattaattaatttaatacgttcttccatcaaagaaactttactttgtcctaccgttgtagttaaagcgtgtaattgtctgtttacatttgtaatatcaacatcatctttatctattaatataatatgaccaatattcgttcttgctaatgcttcagcagcaaatgaaccaacacctccaacgccaagtatgacaacagtttgttgcttcaataaatctaaaccttgttgtccaatcgctagttcatttcttgaaaattgatgtttcattattttacctctttcactgatttatacataagtacatagtaacttaaaattttatatttagcattatcgctttgattattttcccaaaattcaacgaggaaacatttattaaacgctataaaacccaactaattctttattaaaaacttaaagaaacgcataaaaatacgcaagacaaagtcttgcgtatcgatagagtccgtattgccgtagttataatagcttgatcattcggcctgttatatacaggtgggtgccctgtttcttgttttgtacgtccttcatataaggcgtgtacgctgcaagaaaacccattgggctcccttgatcaaagagtgttaggcccaaattaaaaagcaaacttacgaacaactcagatgactatcttatgatgttatattaccacataattaaaattaatgaaattataacaaaccaaagtttattgattttttaaaatttagtgacgaattcgcaaagaaagttcttctaattgtttatcagaaacttcaccaggcgcattcgttaataaacatgtagcagatgctgttttagggaatgcgattgtatctctcaagtttgttctattagtcaataacatgactaatcggtctaatcctaatgcaataccgccatgtggtggtgcaccatatttaaatgcatctagtaagaagccgaactgttcttgtgcttgttctttagtaaatccaagaacttcgaacattttttcttgtaactcaccatcatgaattctgattgaaccgccacctaattcataaccatttaatactatgtcataagcatttgcctcagcttcttctggcgcagtgccaagcttagcaatatcagcttcttttggagatgtaaatggatgatgtgctgcaacgtaacgtttcgcatcttcatcatattctaataatggccaatctgtcacccataagaagtttaattttgtttcatcgattaaacctaattctttagctaatttgacacgtaatgcacctaaactttgtgcaacgacatttggtttgtctgcaacaaacattactaagtcaccagcttcagcaccagttaatgtaagtaatgtttcaacattttctgtttcaaagaaacgtccaattggacctgtcaaaccatcttccacaactttaacccacgctaatcctttagcaccatagatgtttacaaattctgttaaagcatccatatctttacgagtatattgttcagctgcacctttagcgacaattgctttaatttcaccatcattttcaacagtatctttaaatactttaaagtccatatcacgtcctaattgagaaacgtcaattaattccatttcaaaacgtgtatctggtttatcagaaccatagcgacgcatcgcttctttatatgtcatgcgtgggaaagcgccattaatttcaacgcctttaacttctttaacaacttttttaagcatttcttcacccatttgcatcacatcttcttgatctacaaaactcatttcaatatcgacttgtgtgaattcaggttgacgatctgcacgtaaatcttcgtcacggaagcattttacgatttggtagtatttgtcaaatccactaatcatcaataattgcttaaataattgtggtgattgtggtaatgcataaaattcaccatcatgaacacgagatggtactaaatagtcacgtgcaccctcaggtgttgacttcgttagtactggtgtttcgatgtcaaagaacccttcatcatccaaatattgacgaatagaacgtgtaatttgatgtctcattttaaatgtttgcgctaactcttgacgacgtaaatctaaataacggtattttaatcgaatattttcatcaacgttaacattttcttcatttatagaaaatggtggtgtctcagatttattaatcactttaatatttgtaacttgtacttcaacttggccagttttaattttaggattaactgtttcagggtcacgcttcgtaactgtaccttgaacttctacaacatattcagaacgtactgtttcagcaattttcaatgcctcttctgaaaatgcaggattaaacacgacttgtacaattccttctctatctcttaaatcaacgaaaatcaatccacctaggtcacgacgattgttaacccatccttttaatgtaatttcttgtcctaaaaatgcttcagtaactaatccacaataagttgttctcttactcatattttaacgccctctctacttcttaaaatattcgactaatgcgtctaattcaattgtttcagattcaccagttgtcatatttttaacatcgattttattattttctaattcttgatcaccaataacgattgtaaacttggcacctaaacggtctgcttgtttcatttgtcctttaattttacgctgtaagtagtctttatctgctttaataccattatgtctcaaatgatttaataacttcacagcatatcgatctgcttgatcacccattgtaacaatgaataaatctaagttttcttcaatatctaattcgataccttcttcttcaagtgcaagcaataatcgttctatacttagcgcaaaaccaatacctgtttcacttggaccatctagcaattctaataaaccattataacggccaccaccacaaagcgttgtaatggcaccatcatagttaggattatccatcattaattcaaatgctgtatgtgtataataatccaatccacgaactaagttaggatcttcaatatatggaatacctaaatcatctaaataagcttttacttgttcataatatgccttagattcctcatttaagaaatcagtgattctaggtgcagtcttaatcgcttctttatcacggtcaactttacaatccaaaattcgcatcggatttgtatgcaaacgtgattgacaatctgaacaaaattcatgaattactggttcaaagtgtttcactaacgcttcgttatattcttttcgagacgccatatcccctacactattaataacaagctttaaatgttttaatccaaatgattgataaatatgcataaccatagctaatacttctgcatctacgctaggattttcagcaccaatagcttctacaccaaattgattaaattgacgatagcgccctttttgcttacgttcatatctaaacatcggtccattgtaataaagtttaattggttggtttggattaccttgcattttatgttcaatatatgaacgcacaactgcagctgttccctcaggtcttaatgtaatacttctatcgcctttatctttaaatgtatacatttctttttgtacgacatcggttgaatcaccaacacctcttgcaaaaagatctgtactttcaaaaattggtgttcttatttctttataattataaaatgtcattaattcatctaattgattttcaatgtaacgccatttctttgaatcttcaggtaaaatatcctgcgtccctctaggtattttaatcattttgacatctccctcggcaaactattttatttaattacctttttaaaactaaaactatatacgatcacttaactttgcatgataaatcataattttaaaagcaaaagaaaaagcccttgcacagcctgaaactgcacaagggacgaatatccgtgttgccaccctcattggtttaaaaaacatgcctaattgtaatcatcattactttttataagcgtgcattaaataaacccactcaaaacgtttaacgtacgtttaacggctttacttttcataaagcacctcttcttgtgttcaatgtatataaactactcagcataatctttcagtctatggattatattcctacacaatcttagttagattgctacctatttcatttaccatttcaagaatactaacggttttagttataaaattcaatatcaatgataactactttcacatatttttgcaagccctacgcagaaaaataaattttaagtccatcaacaattgcttgttctaaaatttgtctatgtaattgatctttaatcatcgtttcatcagttgggttactaatataacctaattctaataaaacagcaggaacttttgtttgtcttaacacttgataattttcttgtcttgaaccgcgattagaaagtaaacctttcttctgaatcgtagcgtctaacgtatctgctaaagctctttgattatcatgataccaataaactgtcattccatttgcattagatgattctaatgcatcattatgtatactcaaataggcatcgcctttgatatcacgattttctagtgaaacatatgtatcgtctgttcttgtcatcttaacagttgcgccttctttttctaaagtacgctgcaattcttttgctgttttcaacgtatagtctttttctaaacttttatatttagtattgcttgaagcaccctggtcactacctccatgaccaggatcaagcactattgttttaccttgcaaaggatttttctccttcgtattatccgcgacaatatctaaatttgtgtgccatccagctatccaacctttttcattactggatgtatcttcaacttcaatccatttacctactttaccaatctttttaaaatggtcacctttctcaactttatatatgactggatacgcagcgtttggacctgtacgtaattcagcattttcagttatcgtgatgttcccactatcttcactattgctattcagcaataaaaataaaaagatgataaataagacaaaggcaatcactactattagagtacgtttatttttaagaccctttttagataaccatgcctctatttttttcattgaattttgccgtcctgactttcataaataatagtgactggaccatcattatttatgctaacattcatgtgtgttccaaattcacctgttttcacagtaagaccatacgctcgtagcgcatcattaaaatactcataaatttttaccgcttgatcaggatttttagaatttgagaaacctggacggttacctttttttacatctgcatagagagtaaattgtgaaactgatagtatttcaccattcatttgttggatattaaagtttaatttattattgtcatcttcaaataatcttgcattagcaattttctttgcaattacatctgcatcttgctctgtagagttctgaccgataccgactaataaacaatatccttttttgatttgattatttaatgtatcattcgtcaccgatgcttctttaactctttgtacaactactttcatattttgcacctctagttccaaactcttgttactgtataaacatcaccaagttgtttgatcttttctaccacacgataaacatcattcacgtttttcaccatgacactaatatttattattgcatttttatcaatatctgaacgtcctgaaactttaattaaattgccggctgtcgagctaacagcttgtagtacttcattcaacaagccatttcggtcatacgcagttacctctaaatcaacctgatatttttgagttgcgtcttttgattttacccattcaacattaattagtcgttcagtttcgttcttaatatttgggcaatcagtgcgatgtactttaataccgtgacctttggtgatataacctacaatatcatcacctggtataggattacaacattttgacaacttgataagtacattttctaaaccttctacatagacaccactatcagtaatgatgttgtctttaataggcaatgatttcgtaacttcttgtgcttcatttaaagcacgttgtttatctaaaatacgttgtctttcagttaatttattaacaatctgtaaggatgtcacgccgccaaatcctacagctgcgaataaatcatcttcatttgcaaagttatatttttcattaacaacctgaatatttttctctgtcaaaatatcttcgactctaaatccttgctcttttatttcaacttcaaccatcattcggcctttttcaatattagatgaacgatcttgttttttgaagaaacttttaattttacctttggcactagacgatttaacaattttcaaccaatcacgacttggtccatatgaatgtttactagtacgtatttcaacaatatcgcctgtttgtaaaatatagtcaattggtacaattttgccattcaccttggcaccaatcatcttattacctacttcactgtgaatcgcataagcaaaatcaatcggcacagcaccatatggcaactcaataacatcactcgctggggtaaatgcgtatactttgtcactctgtaagtcatattttaaggtttccataaattcttgagcgtcagacgatgtatgatccgcttcagctaattcttttaaccaatttaacttattttgataagtttgatctttttcacttacttttttaccttctttgtaagcccagtgtgctgcaacaccatgctcagcaatttcgtgcatatcaaacgttcgtatttggatttcgagcgggtctccatttggacctactactgtagtatgcaatgactgatacaaattttgtttaggcattgcaatataatctttaaaacgtcctggcatcggtttccataacgtatgcaccaacccaagtatcgcataacaatcattaatagaattgacaataacacgtatcgccaacaaatcaaaaatttgatcaaattgttttttctgcttcatcattttccgataaatactgtaaatatgtttaggtctaccatttatatcgccttcgatattcattcggtccatttcagtacgtattctatcaatagccgtttcgatatacgcttcacgttcactacgtttcttcttcattaaattgactattctaaaatattgcacattatcaatataacgaagagccgtatcttctagttcccatttaattgtattaataccaagacgatgtgctaaaggtgcataaatttctaatgtttctcgagaaattctaatttgtttttcacgcggcatggctttcaaggtacgcatattatgtaatctgtctgctaatttcaccaaaattacgcgtacatctttggcaatcgcaataaataacttgcgatgattttcagcttgttgttcttcttttgagcggtattttacttttttaagcttcgtcacaccatcaacaattcgagcaacttcttcattgaacatttcttttacatcttcaaatgtatacggtgtatcttcaattacatcatgcaaaaaacctgcgacaatcgtcggtccgtctaatcgcatttctgttaaaatacctgcaacttgtataggatgcataatgtatggtaatccgttttttcggaactgacctttatgtgcttcataagcaatatgatagctttttaaaacatactcatattcatctgctgacaaatatgattttgctttgtgaagaacttcatctgcactatatggatattcgttgttcattatatgatacaccccattcatatttattacttcgccttaaacaatgatttaggtactcttgttgaatagtatttgtcccacaccaatcatacgtccgtcgacgataaatatttatcctgtcgtcattaatcgtaatattaattttacttgagcgagtttaatttgtatactattcctacttttaaaacttttacaaaaattcgacctaaatctactgtttcattttttaaatattagttctatgatactacaatttatgaaataaataaacgatgttattaaggtataatgctcaatcatctaacattttcagtaaataaaaaatcctaacatctcatgttaagaaaacttaaacaacttttttaattaagtcattggttcttatacatttgatgaaggatttcatttgataaaattatattatttattattcgtcgtatgagattaaactcataacatcgtaatctttaattttttcaataccatttaaatatttcaattcaattataaatgcaatacctactacgataccgcctaatttttcaactaattttattgctgcttcaatcgtaccaccagtagctaataaatcatctgtaattaacacacgttgacctggtttaattgcatctttgtgcattgttaaaacatttgtaccatattctaggtcatactcataacgaatgacttcacgaggtaatttcccttcttttctaacaggtgcaaagccaatccccattgaataagctacaggacagccaatgataaagccacgcgcttcaggtcctacaacgatatcaacatctctgtcttttgcgtattctacaattttatctgttgcatagccatatgcttcaccattatccataattgtagtaatatccttgaaactaacacctggtttcggccaatcttgaacttctgatacgtattgctttaaatccattaatatttcctcctaaattgctcacgacaattgtgactttatccaattttttatttctgaaaaatcttgatataataattgcttttcaacatccatacgttgttgtcttaattgatatactttgctggaatcaatcgatcttttatcaggttgttgattgattcgaattaaaccatcttcttgtgttacaaattttaagtctaagaaaactttcaacatgaatttaagtgtatctggtttcacacttaaatgttgacacaataacataccctctttctggatatttgtttcttgtttagttattaatgctttataacactttttaaaaatatccatattaggtataccatcgaagtaaatcgaatgattatgttgcaaaactatataaagttgagaaaattgcagttgttgcaaggaattagacaagtcttccattgacgttggtaaatctcttaatactactttatcagtttgttgtttaatttcttcaccataataatattcattcgcatttactttatcacttttaggatgaataagcacgacaatattttcatcattttctgtaaaaggtaaactttttcgcttacttctataatctaatatttgctgttcattcatcgcaatatcttgaataattaattgcggtgattgattaccattccattcgttgatttgaacagatcctaatatattaattggctgttcatcttgtaactcaggttctaagtgtccattttgccaaaatagcgcggcgatattactttcaccaagtgtcaattttagatgatttttttgttgaccgatcgccttaactgaagaaactgataaatcatccatttcaaaaataggtctagaaaaatctgttccgaagggtcttaaacgattcatatcacgaatatttttaatcgttatatcattttctgttaataatacgtctactggctttacgggatctaacgaagttgttttagataattctttcatccatttatttaaaccttcagctaacgattctatattttcaatatccatcgtcatacctgcagccatatgatggccgccaaatttagcgattaactcttgatgtgctgatagtatttcaaacatcgacacttgatcaattgatctggcggaaccttttgcatgattttgctccctatcaatatttaaaattaatgttggcaaagcaaatgtttcgacaattttcgaagcaacaatacctaagacaccttcatgccaattttcttttgctaaaagtaaaaataaatctccctttttaactttcgtttctgccatagccattgcttcttctgtgatagttgctacaatatcttttctttcacggttaaaatgttcaacttgttctgctaaaaatgcagcttcttcttcgtcgtcagtcatcaacaattcgcaagctaatgatgcgtcatctaaacgacctacagcattaagtctaggtccaataataaaaccaattgtttcttcatcaatattgtcattgtatcccgcttcttttagcaatgctttaacagaggtcggacattgatcatttaagacttttaatccttgtttcactaatgatcgattttcatcagttaaggatactaaatccgcaatggtacctatcgcaactaatgctttaaaataatcaggtacattttcaatcaatgcttgtgctaatttgtatgcaacacctgcaccacacaattgttggaacggataattaaacgatggatgcattggatgtacgattgcatatgcttctggtaatgtactaccaatttcatgatgatcagttacaatgacatcaactcctaaatcttgaaccattttaatttcattatgaccttgtatgccattatcaacagttatgattaatgttatgccttcatcatgagcatttctaaatgctagttcgtttggtccatatccttcggtaaagcggttaggaatatgccatcctacttgtgcacctaaaagttgtaatgttgtcactaaaattgtagttgaggtaacaccgtcggcatcgtaatcaccataaactaggattttctcatcattcgctatcgctcttttaattctttcaatagccttagtcatatcgctcaattgcaatgcatcatgattgacatctgtgtctgaaatgatggattcaattgcttgttcatcaataatcgatttactttctaatattttttttacgattggcgttaactttaattttgatgttaattcatcacttatgtattcagctggtttagttaatttccacttatacttcggtttaatcatatatatttacgcctcatttccaaaagacattatatctaaaattactttaaataaaaagcacttatctaaataatcaagactttaattataccattttttaaaaatgaatgcgggaacttatttatatatattttgttaaatttaaataaagtaaaaagcggtatgtgaactctttattgtttcacataccgcttaattcattttaaactaaaatcttttcatcgttcgatttcttttctttatatacaactaatttgtgtttcggcgattttttcaactgacgttttttcattattccccatagcggaacggcaatgaagattgaagagaatacaccagaaatcaatccgataaataatgctaaagtaaagttgaatatcgtaggagcaccgaagaatagtatagcaactactactacaataactgttaatactgtattaattgaacgtgtcattgtctgtctaattgatctattaacgatatcatcaatttgttctgttgtcgtaatcactttaaccttttgtaagttttcacgtacacggtcaaacgttacgattgtatcattaattgaataaccgacaattgttaatacagcggcgataaatgttaaatctacttcaattctaaataaactgaaaatcgctactataatgaatacatcatgtaataatgccaatacagatgaaagacccatgcgccattcaaatcgtaatgatacatagatgatgatacctatcgatgcatagattaatgcaagcattgcattttttgctaattcctgtccaataattggtgatacagtattaatttgaggtgtgtcaccgaatttcgatttaatattatcactcaatttattatcttgagcacgcgttaaatcgtctttaaattgaacagttgctactttattatctttaccattgatttgaatttgatccgctttaagtccactatcttttacaacttgctcaaccttttgttgagtaattgcttgtttagattggaaatctacacgtgtaccacttgagaaatcaattcctaagtttaacttgaagatataaagaataactaaaccgacaactacaattaaaatacttactccaattaatggcttagctaatttaacaaaattccatttctcgaatgaagttttaaggtcatgaacatctacaccttcattaatatcatgtcgtttattctttttaacaccaaataaccaaaattgatttttgaatatatttgatgaaacaagtaatgataataagaatcttgataagaacacggctgtaacaaagatcattagaatacctaataataacattgtcgcgaaacctttaactgaactttcaccgaagaagaataatactgctgcggcgataactgttgttaagttagaatcaaaaattgttaggaatgaacttttgtttgctttagaaaaggcttgctttatcgttctacctattcgaagttcatccttaatacgctcatacatgataatattggcatctacagccatacctacacctaataccaacgccgctaatcctggtaaagttagaaccccggaaatgaaattaaatgctactaacgttagatagatataagttgtcaatgcaataatcgctactaaaccaggtaatcggtagaatccaagcatgaataaataaattaatgctacaccaataaacgatgcaaacacagttttatctaatgcatcttgaccaaattgggcacctactgagtttgaataaatttctttcaagtcaactggtaaagaacctgcatttaacaattcggcgatttgttttgcttttttaacgccttcttgtcctttaaatccacccgagatttctacgctatcagaattgattggttgatcaacacttgctgcagaaataaatttagggtttttcttttgtgcttcttttttatagctgtcaccttttttgaaatctaaccaaacaaccatgacattatcacgtttcttagagatttcttccgttacttttttaaatttgtttttgtcttttactttaaaagtaactgtaggctggtttgtttcctgtttaaattcttgtttggcagatccctgtttaatatcagaaccgcttaattttactttatcttctgcatcgcgaattgttaaattagcttgagaagataaaattttacgtgcttcattctggtctgttacaccagcaagttgaactctaattctattaggttcttcaacttgaattttaggttccgaaacacctaaaacgttaacacgattttctaatgtttgcgctgttgattgtaaggcttttttatctattttgtcgcctttatttaaaggatcgacttgataaagcacctcaaatccaccttgcaaatcaagtcctaaattgacattctttataacacttttataagttgcagccattccggcaaacaacaatacgactaaaagcaagaacgcaattattctactacttttcttcacatgaacacctcattatttacgtatgtatttagaatacttgaatactattttataacgcaagttaaatctttcttacaaaatttattagccttatacatattaacatactagagcagggagtaaaaatagtcatagatatatttaatttaaatttaacaattattatgtatcacaatttctttttttggaataaaaataagctattctacatactacttataacttaaaaaggatgaaacgctattcgtttcatcctttttaataccacttctcgttatgaagggtcaacttgtttaatagcaggtttttcgaaagttaattcagtaccatgaccattaactgtaataacaacagttgtttcatctactgctttaacagtacctttaataccaccaatagttgtaattctttgaccagattgaatgttattaatcaactcacgatgctgtttcgcacgtttttgttgtggtctgatcatcaagaaatacataaccgcaaaaattacgactatatatattagtaatgaaaattgcattttatacgctcctcttgcttaaaagttttttgggttctcaacatttaatccatattgctcgaagaattcttctttgaaatctaaaagacgatcttctcgaatggcttgtcttatatcttccattaattttagcagaaaatgtaaattatgaatagtagtaagacgaataccaaaagtttcctctgccttgattaaatgacgtatatacgctcttgaatagttttgacatgtataacagtcacaattctcatctaacggtcttaaatcatctgcaaattttgcatttttaataactaaacgaccttgcgatgtcatacaagtaccatttctggcaatacgtgtcggtaagacacaatcaaacatatccatgccgcgaatactacattcgattaacgcatctggagatcctacacccattaaatatcttggtttatctttaggcataaactgctctgtatgttcaaccattttatacataaccggtttaggttcaccaactgacaaaccgccgattgcataaccaggaaaatctaattctactaaatcctttgcactttgttctcttaaatcttcatattcgccaccttgtataatgccgaacaatgcttgatcttcaggtctttggtgtgcatctagacatcttttcgcccaacgtgttgtacgttcaatagatttttttacataatcatattcagcaggcatcggtggacattcatcaaatgccatcataatatcagatcctaaatcattttgaatttgcattgatttctcaggactcaaaaataatttagacccattagtatgatgtctaaattccacgccttcttctgtaattttacgtaaattacttaaactaaacacttggaaaccgcctgaatctgtaagaatcggaccatcccaattcatgaatttatgtaatcccccagcgtgtttgataatatcatttccgggttgtaaccacaaatgatatgtgttgcccaaaatgatttttgcttcaatttgtcttaactcttctggactcattgttttaacggttgctttagtaccaactggcataaacataggtgtttcaaatgaaccgtgtggtgtgtgcacgatacctaaacgcgcacctgattgtttacaagttttaatgtgttcgtatgttactgcaggcatattcaaaatcctcacattctttttatataattaacattgcatcgccaaaactaaagaatctatattctaaatttactgctgttttataagcattcagaacattttcacgagtactaaacgctgatactagcataactaatgttgattttggtaaatgaaaattagtaatctggccatcaattgctttaaaatcaaatcctggataaataaatatattagtccagccactcgtttcaacaaatttatcatgatcgcgtcgaattgtttcaagtgtacgtgttgaagttgtaccaactgatataatgcgatgtcctttggacttagtatcatttaataaatcagctgtttcttgtgtcatttgataatattcactatgcatttcgtggtcattcacatcatcgacgctcaccggtctaaacgtacctaacccaacatgtaatgtaacaaatgcgatattaacgcctttatttttaatttcagttaataactcatcagtaaaatgtaatcctgctgttggtgctgccgctgaaccactttctttagcgtaaactgtttgataacgatctggatcatctaaacgttctttgatgtatggtggcagtggcatttcccctaattcatctaatctttcttgtaaaataccttcataatgtaaacgcatgatgcgtccaccttgatccatttcttttatgcactcagctataattttgccattaccaaaattcaatttattaccaactttaatacgcttagctggtttcagtaagacttcccaatcattaccttcaatttgagttaacattaacatttcaacttttgcaccagtttcttcttttaaaccaaaaagtctagctggcattactcgcgtatcgttaagcactaatgtatcaccaggtctaaaatactcaatgatatctttgaaatgtaaatgtttcatttcaccagtttctctatccatgactaataaacgactatgatcacgatcttttaaaggcgtttgagcaattaatgattctggtaagtcatagtcaaattcttcaatattcacgttatcctctctcctcattcgactttgcaaaatgttcataagctaatggtgttgcttttctgccacgtggcgtacgttctaaaaagcctttctgaataagaaatggctcataaacgtcctcaattgtaatacgttcttcaccaattgttacggcaatcgtatctaaaccaacaggtccaccattatactgcttaataatacagttcatcattttatgatcaatgtaatctagtccgtgttgatcaacttgaagtaaacctaatgcgtgcttcgttgtttcaatgtatatttgttcatcttcattcacttgctggaagtctcttacccgcttcaatagtcgatttgctactcttggagtccctctagaacgtttagcaagttcaatggcactttcttcatcaatacctgtgcctaaaacctcagctgttctaataatgatttcttttaaatctgattcattataatattctaatcttaagtgcacaccaaatcgatcccttagtggacctgttaagctgccagctcgcgttgttgcacctaccaaagtgaatggaggtaagtcgatacggatacttctagcctcatcgcctttaccaatgataatatctaaaaagaaatcttccattgcagggtataacacttcttcaacaacactactcagtctgtgtatttcatcaataaacaatacatctccaggttgaagtcctgataaaattgcagccaaatcaccaggtctttctaatgaaggccctgatactgtacgtatattaacttccatttcattggcaatgatattagataatgttgtcttacctaatccaggggggccaaaaagcaatacatgatctaatggttcatgacgaagtttagccgctttaataaatacttctaaattactttttattgaattttgaccaatatattgtcgtaatctcgtaggtctaagcgacaattcgaaatcagtttcttcactatgcattgattgatcaaccatacgctcattcatgacaacacttcccctattaatctatttaaaattaagatacaactaattgaagacctgccttaacagcttcatcaactgagtcatatttatttttatttaacgttttctcaacttttgcaagctctcgtttagaataacctaatgcttctaacgctaacattgcttcttgcacgaattgatcttgcaccgtcgaagtagcgtctacttgtaataatgaatcgctatcttcttcagtgattttcactttaccttttaaatctaagacaatctgtcttgccgttttcttaccaattcctgggaatttagttaaatacgtatcattttcattttcaatggcacgttttacttcattaggcgtacttgtcgctaaaatagctaaagctgatttcggaccaataccagtaactttaattaaactcaagaacatatctttctcttcttcactactaaatccatacaataattgtgcatcttcacgaacaattaaagatgtacgaattaaaacttcatgatctagatgcttttgaaaacgataagaatttggtgtttgaatttcataaccaacaccagcagtttcaacaactacgtgtgtaggatataaatgtgttaacttacctttgacatacgcgtacattataggcacatccttacatactcatactaattaattctacttttgatacataatctaaatttctcaaagcaccaataacatcttctactgaagtttctttagatttagcattcagtgataatgttattgttgctttttcttccattggaatactttgatgaatcgttaatacagatagttctaactttgatataacatctagtacacgtgccaacatacccacaatatcagttacatataaaattaatgtaaattctcgatggtcaagcattttatcgtctactggaaatatcgtttctctatatttataaaaagcacttctagatagatcaaactgtttaacggcatcataaatggacaatgtcggatcactttttaaggcatctttaatcttcaatgttttaaccacggattcaggcaagacatcttctctaattaaataaaactttttataatctttattgtccatcatgttacgctcctattcaacgaattcaaattctccgccaagaattctaacgatatcaccatttttacaaccacgttctctaagtgcatcatcaatacccatcgaacgcatttgacgagcaaatcgacgtactgctggatcactgttaaagtcagtcattttaaacattctttcaatagcattaccacttaccacataagcaccatcatcatctcttgaaattgtaaatttatcttgtgacggtgtatgtttatataatactcggttaatgccaactgactcctcttcttcaactgtgaagtcaacatctttatattcttctaatttatctgctattgcatataataattgatcaatattatcacgcgttattgttgaaactggaataactggcacatcttcgccaatttcttctttaaacaagtttaaattatcttgtgattcaggtaaatccatcttgttagctactacgatttgaggtctatcttctaaacgttgctcgtacgcagctaattcttgattaatgactttataatcttcaataggttctctaccttcagaaccgctcatatcaatcatgtgaacaataacttttgttctctctacatgtcttaaaaattgatgtcctaatccaacgccatcagatgcaccttcaattaaacctggtaaatctgccataacaaaactacgttgatcaggcgttgaaacaacacctagatttggtttaatcgttgtaaaatgatatgccccaattttaggcttagcttttgaaacgatagataataaagtcgatttacccacactagggaaacctactaatcctacatcagctaataatttcaattctaaagatacatctaattcctcacctggttcacctttttcactgaagtcaggtgcagggtttctaggtgttgcaaaacgtgaattacctcggccacctcgaccgcccttcgctactacagctctttgaccatcttcaacaagatctgctaacacttcgtctgtttcaacatttttaataattgtaccaggtggaacttttaatactaaatcttccgcatttttaccatgcatattactactttggccattttcacctttgcttgctttaaaatgacgttgatatctaaaatctaataacgttcttaaaccttcatccacttcaaatacgactgaagcacctttaccaccgtcaccgccagctggtccaccaaatggtacatatttttctcttctatatgcggtaataccattaccaccatcaccggctttaagagatattttgacttgatcgacaaacatatatctcacctcttttacatataattttcattttcccaataattatagcatattagagccccttatatattgtaaataattaggggctcttatgcagttgcttttaaatttactttactcaaattgctgatatttccgaataccaaatatgatactttttttgctttttatactgcaactgtattcttttgtccccttatagtttagcgattaggggctcttatgcagttgtacatttagtataacgtctaaaattcccattttttaataacataattaaaataataatgaaaaaccttttataaaaagtaaaaaacaccagaagattcacttctggtgttaactagacaaaattattcagctactgcatatacagaaacttgttttttgtcgcgacctttacgttcgaatttaacaacgccgtcgattttagcgaataatgtatcatcgccaccacgacctacattttcaccagggtaaattttagtaccacgttggcgatataaaattgaaccacctgttacgaattgaccgtcagcacgtttagcacctaagcgttttgattcagagtcacgtccgttttttgtagaacttaccccttttttagatgcgaagaattgtaagtttaattttaacatcggaatgcacctcacttataatttaatctaatattctcattatattcttcttcaatagtttgtaaagacacaagcattgtttgaagaattagttgcgcttcatcgttatttgtatcaacgcttcttatatgaaaatgaccaccattgtcgtcataattgatatctggtctctcagatgtcaatcctataatcgcattaacactaccaaacaatacagctgaagctccagcacaaacgatatcatgaccatattcaccatggtcagcatggccatccataataacgtctgttactttgccttcatcattaactgtaatatcaacagtaatcataataattacgcgttgattttatcgattgttaatttagtgtatggttgacgatggccttttttacgttttgaatttttacgacgtttgtatgtgaatacagtgatttttttaccgcgaccttgtttattaacagtagcagtaactgttgcaccttcaactgttggcgctccaactttaactgaatctccacctacaaataatactttatcaaatgtaaaagtatctccttcgtttacgtctaatttttcaacgaagatttcttgaccttcttctactttgatttgttttccacctgtttcaataatagcaaacatactttgcacctcctgtataataagtcacgccatacataggtgacatttcgttattgagtcaagcgtttgcactctacgttgtttcggtcgcaactcgagtcatttataaacataaactcttctcgtttcttccttcaacgccttgattgacaatcgctttcttcattaaaaatgttcttgaacctatatttgagcggttgtatgtagctacttataactactcaactattgcatcttaccattgacgacgtttcatgtcaatgtcattgtttgtttttttaaggaactttataatcaacggataaagcataatcaacagtacaaaattcataattaatgttggcaataatctaaagactacaaaatgaataatatcaaattgaatgaatcctaacataccgtatattaatgccacatagacttctaataataaggtgctggctaatataataatgaataacatcgaatgatctttgtaaaaaattttaaagaatcgatctataagtgctaaaaacaatatatagccaaataagtacactccataaatactaccaaagtatacatcagtcattacgcctaaaaatatgctgagcaataatgatacgccaaagccacgatacactaccatcattaaaatatacataaatgtaaggtgtggtacaaatacaagttcaaacttacctatatgcattggaataagaagcccaattgcagtatctatataaaatagtaaaatacctatcaaaaaataatacagtgtacgcattatttatccctgctttcatcatcaggaattgttttaggatctctttttgcaacataaacatgactcaaatctgttaagtctgcaccagtcttaaccctaacttctttagctaagccgtattgatcattttgaaccttagtcacttctcctatatataaattacttggtagttgatcagctaatccacttgtaacgactttatcaccttttgagatattatctctattattaatgtcactaattacaagttctgagttcttttcatcataacgatcaattaaaccaaatatatttttagaaccgtgttgtatatttacagataatttacccgcacgtgtattagttgagattaaatcaacttgtgaagaaaatttattaactttagtaactcttccaacaaaaccttgtgatgtcatcacagccatatttgaagttatacctgatttagatcccttatcaattacaattgtattcatccactgatccggatttcttgctaaaaccgtagtagaaataggatcaaattttgaaatatcttttaaatcaagctctttttttaatttttcattttccgcttctaattgttggttcttagattctaactggctaatcttatttttagattctttagaatctccttttttaaaaaagtccccaatcgtaccagcaacaaaattaactggataactcacaactcgttgtccaaaagacacagaatcacctatatattgttcaggaggtgattgagattgtgaacgtatggacagcccaattaatgcaataaaaacgataattgcacataaaacaacaattaatttgttatttttaaaaaacttaagcacccagaacacctctattatgtcaaaatattgtatatccttttctattttatattactcccattatgaaataaagcactaactacgaattactttgaaaatgaacaactccgtaaaaaatttgtggcattttaaaaacaaaaaactactagcaaacattccagtcactagtagtttaaataatcgatttaaattttaaaattatttgtttgtatcgttcgaggattcactgttcgaattctgaagttgtctccaacgtgcgaataagttctgggccttttgttgttcattagcttgtttctgttttgattgttctgccatttgaactacaccaaccttttaaatttattctagtgacaggataactaaaatatatttcttatgcaataatttcctattgataagcattttcgggttttagttgtaaattttgccctaattcatttaagtcttgttgcatttcaaattcagtattgtaaacacgcattgactcatctccaaatttataaagaataaattcgtctcctctttgacctataatatattgatcattataagccatgcgattcattccagacacagccataaactcttgtttatctatcattttaaatacatttttaatttggcttaatggtacattctttattaaatcattttcttttaatgaatatttctcaccacttacataaacatgttgggcatcattagtgggttgcgtaacttgattcatttgatcattatcgtgatttacaggattccaatcttgttcttttaaaaaaggtgcgtatttcaaggcgatataaacaattatcacaattgctattactgctataatgtttttaatcatactaaatatcaatctcatagttcgcctccaatgtcttcatctaattatatattttattatgtatattttcctcagtcttcagccttaatcatgatatatcttaggactgatgcacgttcatttaaaatagcttataattttgttatgatttaaaagcgtatgaggaggtttgtagcattgagtatactaacaattattttaatagcactattagtcatcctcctttttagagttggactttctattttgcgatttttaatttatgtcggacttgttttattatgtatttacttaggatatcaaggtttaatttggttgctcgatttttttcaaataaatagtgggtttttaccgcactttcaatttaacaattaaatttattctgcataacaaaactcctaatgtactagtttagaattttttaactagttccacattaggagttttaatttggtttcaagcacggatactacttgatgaacagattactattacttacgcccaaatgcgttagataaaaatcgtatcagcgcgtagctaccacttagtaaaaggccccaaacgattccagtaaaaattgagccgattgctacacttaataaaggaaaagcttgtttcgtaacgatcacacctgctaacgccgttactaaaatacctaacgtagataaagctaatgttattaatagattgcgctttgttacaggttcatttttaatatttaactgcatggtataaaccattggcacgagaaccccgataataataaatagagtcactatttttcctccaatgaaagtacttcgtaggtattatacacaagatacgtcattaattctatcaacttcaatcattttcatcaaagtaacccgcttctacaagactggtaaatctattatcaccgattataatatgatccaataaatctatccctaaaatcaaaccacactccttcaacctcattgttgttatgatatcttcttgtgagggcgttacatcttatcaagagtaaattacaaaagaatcatttaaatcaatactttcactttgaatacatgtatttgaagtggaaggtacttatttcaaaaatagtaaaacctgtatcttaaattacttaatagtaacataagatacaggctgattttttattcattgttatttatactaaagcacccgatagctctgaaaacaatcacaaattcaacttttcaaagccacagctttaagttattttgtccagacaacccccattgcccaacccattttatggaattggcatccaggcaacaacttttcatataaatcgtaataattttgttcagataggtacttatctgaagctaaatgctcaagccatgatttagatgtgttgtgattataaattctaatcgcattttttattccaaatttgaaacaatgcggtaaaaactcttggattgcccctaatttataaacataggtaggcggtgtctcgacttcagatacattatcaagaataactattcttccttcctcattcaacagttccttcatttgctgtattacgctggctatatcatccaaatgatgaaaggttgttcggcttacaataaaatcaaacttctcattaaaattaagttgttctgcattcatattcagatagaccgtatttgttagttgacgtttagatttggcaagatcgagcatttgattagaaatatcaatccctaccacttcatcataataacttgctaatttctccactaacaaacccgagccacatccgatatctaatgctctgcctttctttggagacatattagacacaaagaatgaataatcattcaaaagctcattcacgaaatcgtaatcttctgcaaccttatcaaactgtgattctattgtattcaaaaagatcccccattcctactttatcgacattctttcattacttaccactttagatgttttttcgttggggataaaacttccctttagacaattttatccaaagacaatacaacagtgcaactttattaaagtcactgtcctttatcgcagcctttactttttagtaaagacagtggcttctcttatcaagtttcaaaacatattattttgaagaaaacgtccatctgaagtgtcaagtgcaaaattacatataaaggtttattctaaaatgaaaagatgatacaatcatattcagttacataaggaggtttcaattatgtgcaccagtatcgcagtagtagaaattactttatctcattcataatgaaaaaaatggaaaggagataaaagtatgggtactttttctatatttgttattaataaagttcgttatcaaccaaatcaaaattaattggttataatgaacgcttaatgtcagttcattataaccagtaaggagaaggttataatgaaccagtaaggagaaggttataatgaaccagaaaaaccctaaagacacgcaaaattttattacttctaaaaagcatgtaaaagaaatattgaatcacacgaatatcagtaaacaagacaacgtaatagaaatcggatcaggaaaaggacattttaccaaagagctagtcaaaatgagtcgatcagttactgctatagaaattgatggaggcttatgtcaagtgactaaagaagcggtaaacccctctgagaatataaaagtgattcaaacggatattctaaaattttccttcccaaaacatataaactataagatatatggtaatattccttataacatcagtacggatattgtcaaaagaattacctttgaaagtcaggctaaatatagctatcttatcgttgagaagggatttgcgaaaagattgcaaaatctgcaacgagctttgggtttactattaatggtggagatggatataaaaatgctcaaaaaagtaccaccactatattttcatcctaagccaagtgtagactctgtattgattgttcttgaacgacatcaaccattgatttcaaagaaggactacaaaaagtatcgatcttttgtttataagtgggtaaaccgtgaatatcgtgttcttttcactaaaaaccaattccgacaggctttgaagcatgcaaatgtcactaatattaataaactatcgaaggaacaatttctttctattttcaatagttacaaattgtttcactaaattaaagtaataaagcgttctctaatttcacaagaggacgctttattcttcccaaaaattgttcaatatttatcaataaatcagtagttttaaaagtaagcacctgttattgcaataaaattagcctaattgagagaagtttctatagaatttttcatatacttaacgagtgctttcacctttgaatatagtccttcccacttatcatcacactctccccgatagccttttctagctatatccagtaaagttacatgctctttaggtaaaagaggtatagcccattctgcagcgacatctttcgaggtaatttcaccagtagtcactgtttgccacattcgagctagggttaaaattacattacgctcatcaccttttatcccctcaattagttctggcaaagaatccttaattgctcttcgaatatctgtcaaaggtacggagacaagtatacttgaagaatcaggaccaaatagagaaatactattctttcttgcttgtgctaaaacaatagccaaatcaggatcatagcttggttcctgaatttgtccattctcaaattcacccctgagccactcaccgtatataaattctctttttggaggatattgccaagggacaacttcactcctatttataaccgtaacttcaagtggtctaacagaatccgtatttccaatctttcctgatatagtcattagtctttctgttagtttttttcgagttaattgaggtaaactatgattcacgacgactagaacatctacatcgctgttaatgcgtaaaccaccatttactgctgaaccaaatagatatactccaactattgaacttccaaataaatcttttacgatttttaatgtttgaatcgcttgatttggtatttttccgttaatcaaattgctcatgatttcacctcgttgattatgttcatataaagtttatattgatactcaatttacttaccctagattggacatatacttaaattactgttcaataaagctgaccgttagcgtttaagtacatcctttcacaatttgtctacagattaataattattctttattatacagatctccatataatttttgaatttggttctgtaattttttattttctttttctaattccattactcttctttttaaggttttaataaggatttcctccgaacgagaacttttcttgggttttgagactacatttgctgttatttgacgctcacgaagggattcgattctttgcctaatatcgtgttccttataaagccatgatttagaaacattagcttcctttgctattgaattaaaattaataactttaccttcaatcgaaaatttagaaatcgctttgtctactttttcccttgtcttttttgatttctgcttcgccaaacgtacaatttctgttgtatttctaacttgtttatccattgataattaccccgtcaaacttccaatgatttgttctaaacgctctttaacacggctattagtctctacttgtctttgccattgtttatccttagctatggctaataactcttctgtacgctctaactgttcttcgtgctgtggtaagaattgcttactggtacagaagtgagtgcaatctaagcatgcattcgcatgtggacaaccacctgctactactggcaatctacaataaccatttggaagcacttgtgcatttatatttttcttgaaccattgaagctctacatcatcgacttcattatcttcatctagatcaagcacatctccattattggtaaccagtttttcctgaaatttagtaaattcattttttagagtttcatcaaagatatgagcgtatctgcttgtcatttctgggctttcatgccccaaaaatttctgcacaatatgctggggcatcccgttgttaatcattcttgttcctactgtatggcgaaaggcatgggcatggaatctataaatctcacctgatttatccactatattttgctcataagctaatttatttaactcacctctaaatgtttcttgttttaatggcgatccatcttttcttggaaagaggtattcactatctggaaattcctctgaaactttatcttcccgaactttaataagtaaagctacctctttagatattggaactatatgctcctttttcattttccattgataatactttaaaaagaaatctccatctttgtcctctaatagacagccttttttcaaggtgcacaattcacttatcctcattccacattcttgaacaatcatagtcatcgtagctatatattcgggtaatttatcaagatgactgttcaattgctctaggacgaattcatctataaagcgtggttttgctcttggtattttcggatagtcctcagaataaattaatattttggaaggaacatcatcccattctagcctaagaagggtactaaatagtccttccaatatagagatcctcccagttattgtactaggttttattcccatcatgtttagttcacttaaatatgcttcaatttccactctcgttaattggtgtactctctgaacttgtttaaatttcatgtccagaaaattaaagaactctttaagtctttgggcaatatcacttacataggaaaagctatccacgttcaatctcaacttacaatatctttttacaagttgtttaaaatatgtattccgaaaccctttaaagttaattgtatattcatattgtgttgggttaaccttatcatctggcaaaggtaagttacgtctatcccaaacgtctttatcccactcctctccatcaaaataaaagttctcataaaactccataaattgttttagattagtaacatagtaggaattagcttttacaggtgttttttcttgattagcagtaatcttataattagtagtggtaattctaacaccccgttttgtcaaataagttctatactccgtcattgctttttcaataggaacttcagtaattgaagtaatgctaggatactttaaatctaagaaatctaacattttattaattactgttccttttctaatccagacagtttttgcattccatattccattgtttaaatggtaaaaataaaaatatttcaattctgttcttaaccacagatttttaacacgttcaaaacgaacccaacgattccttaaagcaggattcttacttaattctatggcagaaggatgtggacattttcttatatcccaactattattagcccaaaacccctgcatttcttcattcattacagctatttttttgctaatctcactctgactaataattttccttttactagaagcattcatttcttatgctcctttctctcgaggtatttattaaactcatttttcatatcctgatctgaaagatgaacataggtatttaacgttgtctgaacatgtgcgtgacctaatctcttttgaacgaacgcaacatcccatccttccctaattagctgcgttgcgtgagtgtggcgaagcatatgtgatgtaaattctattccagtccttttaactattcttctaactagatcaagaacactttggtactttagtggtttcccaaaatagccttcttttaaggaaataaaaacataatcatgctccaattcctcactatactcatatatcaagtaatctgtataaagtgacataagttctttactcacatgtattgttctttccttccttaatttaatataagcttcattaacattaacatctctaggtgttaaatggatttgattgtcccaagtgacaatatcttcaagcctaagcgataacacttcaccgattcttaaaccaccctcatacataagcattaaaattaatttatctcttttcgtatgacaagcatcaataatttgcttaacttcctttgatctcaatgttcttatctgtttctttttaacccttaactttaagacattcttttggtatctacccttattaacatgatgtaaaaatcctttgaaatttcttccctttgcttgtttaaatacatcaattgatttaaattctcctaatctacttaaataatcaagaaaactcataactacatttaaaattgtattcactgtcgtttcttctcttatggctttttttgactgaagatcaattacatttgatgctgaaggatatctcaaccaacctacgaagtctgctaacaactcaaagttaatatcattaagaataacacctctctgttccatgaactcgtacagcaactttaaatgatagcagtatgccttaatggtattaggagacttaccagtattatctaagtatttaataaatttcattactggttctattagctggtattctttatctagtaataaatacaatggatacggcttattctccacttctatcctttgaaccttcacatgttcccacctctttaaatactttaactactacaaattataaaccttgttaatttttatttaaagtaaaatatccctttaatatctcctcttaaactactttaactactattatttattatactatggttaatacatcaccggatggatgattatgaactgcgatgattgcattggcattttctctcaccgcaatactaaaaatttcacgtggatgtacaatcgaactatttaatgtacctttaaaaacacaggtttctttaatcactacattttttgaatttaacaataaaatgacaaaatgttcttgtgttaaatctttcattgttggaatcatataatcagcaacatcacttggttgcgttatttttatacgattattttcagctcttctccccatcctttcccctaactcaaatgctgcttttaaagtaattgctttttgtaatccaatccctttaacttttatcaaatcgttaattgaagattttttcaattcattcagattcgaagcagatttaagcagttcattactaatgtctatgctcgagaatccttttcttccggtgttaattaatatagctaataattctgtattcgaaagactttttgcaccatggcttaacaaacgttctcttggcatttctgaagttaccatttctttaattttcaaaaatatacgcctcctaaaaattgatggatatcattataaaaaagtgaattgataaaaaaggaaataaatataaatggaacaaggggtaatagtttaatcggcttaaatatcatggtaattaaagcaactaaaccagcaatgacaaatgtaaataaaatgacataaatagtgaattggagagggaaaaacaaagaaagtgcagatattagtaaaacgtcaccataaccaatatatgcccgaaataaaaagtagaatatatgcgtggtcatactaataatgataaaagctactggataaatcatacttaacgagagagaaacgatacaataaattataattaagcgacaatctaacattaaagaagtgatatcggtcatagtaaaaataagcagaaaaacatatgtagttataaatagcgtagcatttacgtatgtgaaatcatacttaataaagacgataggtattaaagcaaaggtttcccctaagaaatgtgttagggaaatacgctttcgacagtttcgacatcgcccttttaataataaaaaactaataatcggcattaattcataccatttgagtgacgaattacaataatcacatttcgatcttctatgtaaataatcaaatgacgtttcttctatagatataaattgatatagaaaactaaaaatacaactgcagctataagataacaatactaccaaatgacaacctccttatgtaaattatagttagttattaccaaaatgtaaatatacactatttttcaagaattgaaccgctttttcatttaaatttttcaatattgctaagcataattgatggatactttaacaacccattactgctcggcaaaattaataatggcaagaaattgaaccttataaacacatacgatttagagcataaaaaataaccatgaagctctacctattgattaaatagattcttcatggctattttagttttagttttataatgcttcaaagtctaattttgatttaacttcacttatgaaatacagactaccggtaattactaatgtatcaccttgataattttttataaattcaacgtagtcatctactaattgtatttcatcattttcaatactacctacaatttcttctttgcgtaacactttcggaaaatcaaattcagttgcataaaacgtatgcgcaattaaacttaaatgtttgaccatctcgttaatcggttttccgtttattgctgagaacaaaatatctactttttctttatcatggtactgtttaattgtatcaattagagcatctatactctctgaattatgtgcgccatccaaaatgattaaaggtttgtcatgcacctgctcaatacgtccagtccaacgaactgattcaataccgtctatcatcttattgaaatctaattcaattaatccttgttcatttaattcaataagagctgttatggctaatgcagcattttgtttctgatgttcacctaacatgcttaaaatgattgtttctaattcataatctttataacggtaagtaaattcatcattttgcgatacaacaacaatttctctatctaattcaattggctttgcatgttgttcaattgcgcgttcacgaacatattttaatgcatcttcatttttaacagcatatatcactggaacgttaggctttataatcgcgcctttatccctagcaatatctagataagtaccacctaaaatatctgtatggtctagaccgatactagttaagattgataaaaccggtgtaaagacatttgtcgaatcgttctttatacccaatccagcctcaacaatgacaaaatcaacaggatgtatttcaccaaaatataaaaacatcatcgctgtgattatttcgaattcagttgcaacacctaaatctgtttcacgttccatcatttcacttactggtttaatacgtgatactaattctacaatagcgtcatttgatattggcacaccatttagactaattcgttcattaaatgtttcaataaacggcgacgtaaatgtacctacttcataaccattttcaactaaagctgttctaaggtaagcaactgtagagcctttaccatttgtgccacctacatgaatacccttaatgttattttgaggattattaaattgtgctagcatccattccatacgtttaacacctggtttgatgccaaatttagttctttcgtgtatccaatacaagctctctaggtaattcattgttactaactcctatgcttttaattgttcaattcttgccttcacaccatcatatttttcttgataatcttgttttttacgtttttcttcatttataaccttttcaggtgctttacttacaaagttttcattagagagctttttatctactctatctaattcgctttgaagtttagctaattctttttccaaacggctgatttccttatccatatcaattagcccttctaatggtaataccactttacctgcaattacaactgatgtcattgctttctcaggaatttccacgtcagtgctaatatttaaggtactaggattacagaatttgattaaataatctttgttttgtgataaagttgtttcaatttctttatctttagcttgaattaaaataggtatttctttagacaatggcgtatttacttctacacgtgattgtcttacagatttaatgatttcaacaagttgttgcattgtttgtttactttcttcaaaaatcaatgattcacgcacttctggccatgaagctttaacaattgtgtcaccttcatgtggtaaactttgccatattttctctgttacaaatggcatgaatggatgtagcattctcataatattgtctaaagtataactcaatactgaacgtgtaacttgtttttgttcttcatcattactattcattggaattttactcatttcaatgtaccaatcacagaaatcatcccaaatgaaattatataatgcacgtccaacttcgccgaattcatatttgtcacttaaatcagtaactgttgcaatcgtttcatttaaacgtgttagaatccatttatctgctaatgataagttaccacttaaatcgatatcttcaactttaaagtcttcaccgatattcattaaactgaaacgtgccccattccagattttattgataaagttccacactgactcaactttttcagttgagtatcttaaatcatgtcctggagatgaacctgttgctaagaagtaacgcaagctatcagcaccgtattcgtcaataacatccattggatccacaccattacctaatgatttactcatcttacgcccgtcttcagcacgaactaaaccgtgtaataatacatcattaaatggacgacgatctgtaaattctaagccttggaatatcatgcgtgcgacccagaaaaagataatatcgtaacctgtaactaaggcatttgttgggtagtatcgtttaaagtcttcactttctaaatcaggccaacctaacgtagagaaaggccataaagcacttgagaaccacgtatctaatacatcttcatcttgttgccaattttcaatatcagttggcgcttcttctccaacatatatttcgcctgtttctttatgataccaagccggaatttgatgaccccaccataattgtcttgaaatcgtccaatctctaatattttccatccattggttaaatgtatgttcgaaacgttgcggataaaaatcaatacgatcatctgttttttggttatctaatgaacgtttcgctaagtcttccatgcgcacaaaccattgtgttgataaatatggttcaacaacagcgccagatcgttctgaatgacctacagaatgaacatgatcttcaatcttgataactaaatcttgttcttttaaatctttaactagctgtttacgacaatcaaaacggtccataccttcatatttacccgctttgtcgttcattttaccattttcatccataacgataatattttctaattgatgtctttgaccaatttcaaaatcattagggtcatgtgctggtgtcactttcatagcaccagaaccgaagtctatatcaacatactcatctgctaaaataggcagttcgcgtcctacgattggtaatataacagttttaccgattacatctttgtatcgttcgtcattagggttaacaacaatcgctgtatcacctaacatcgtttctggtcttgttgttgcaatttcaataaaaccttcaccatcagcgtaaggatatttaaaatgataaaacgcaccttgaacatcttcatgtattacttcaatatcagataaagctgtacgtgctttaggatcccaatttataatacgttcgccacgataaataattcctttattgtataaatcaacaaaaacttttttaactgctttacttaaaccttcatctaaagtaaaacgttctctactataatctaaacctagacctaatttagcccattgcgcacgaataaatgacgcatactcttctttccaatcccatgcctgttctaaaaacttttcacgaccaagatcatatctagttattccttgttcatttaatttagcttctacctttgcctgtgtcgcaataccagcatgatccatacctggtaagtataacgtatcgtatccttgcatacgtttcatacgtgtaatgatatcttgtaaagtcgtatcccatgcatgtcctaaatgtaatttaccagttacatttggtggcgggataacaattgtatatgtttcttttgatttatcttctgacggtttaaaataaccattctttacccattcttcataacgtcccgcttcaacttcacgaggatcatattttggtttcatttccatttgctatacctcctaaaaaaataaaaatatccatcctatatacaaataggacggatattccgtggtaccacctatattcaagaaggatgtttaatatcaaattcactcttttaacataattggaataatcataccaatactatcatcgtgaaatttgaaatgcttcatctcttcaagcactctagattatgattaacgctcaaacacgtcttagcctactattaatcacgttcagctaagatactctgtgggctaccttcagtaaaaatcatttacatactcacaccaaatcatatgctctctttaaaataatttgaacttactcttcccaaatcctatattaaactcttaacttatagtataatgattgacaaaataagtcaatgtataggtgggaataaaatgaatgaatgcgcatttggtactaaagatccagtctacttaaactatcatgatcatgtatggggacaaccgctctatgatagcaaggcattgtttaaacttttagcattagaatcacaacatgctgggctatcttggttaactattttaaaaaagaaagaagcctatgaagaagcattttatgatttcgaaccagaaaaggtagcacaaatgaccgctcaagatatcgaccgcttaatgacttttccaaatatcgttcatcatcgtaaaaaattagaagcaattgttaatcaagctcaagggtatttaaaaattgaacaagcatatggtagttttagtaaatttttatggtcttatgtaaatggtaagcctaaagatttgcagtatgaacatgcttctgatcgtatcacagttgatgatactgcaacacaactatctaaagatttaaaacaatacgggtttaaatttttaggtccagtaacagtattttcgtttttagaagcagctggtttatatgatgcacatttaaaagattgtccatcaaagcctaaacacaattaatttgctatagcatcataaagtaaacgagacatcatctatttttaactaatagactgtctcgttttttgatgtgaaaatttattcaaatcataagttaaagttccaagttaatgcactgctaatattagatatcttaatctaaaaatagatgtacaacctttgcttaaaccttaataatgaattctatcctaagcataattcaacttaaatggatgatagtttctaatcttcacgcttattcgaacgatattttaaaaagtaattaattcctggtgcaataataaataggatgaaaaagattcggaaaatatgataactcgtaatcatagcaacatcggcaccagtagctaatgcaactaaaactatctgattaacccctcctggtgctgcaccaagaaacaattcattaataggattattatcaaagaaatgtatgatataaaccatgattagcgcaccaattatcaacataatattttgaattgtaattgcgattgctagtctaccttttaaatctgacaataaatgcgcaatttgaactccaattctaatcatatatattagttgtgccatgttcaacaaccaatgatctagtgtaaatgttaaacctgtagaaaaattccaaacaattaatacaatgagtggtgctaataattgaaatgttggaaactttattttagacataattagataaactataaagatagctatcgctaaaataactatttgccctatgtttaatacttgtgataaaggcaagacttttgttaactttccattcgcatgcatgttaccatcatgaaaaaaatatgaaatgaacggtactaaaacaacaacaaatataattcgtgatgtttgcgttaagctaacaactaacaaattagcacgtttgtcttgttcagccatgaccagcatttgtgttagtgctcctggtataacacttaaaatagctgtttctgtattaatacgtgcaatttttttaaaaataaatgccattactattgcaattaataatatcgaaatagatacaacaataatcgaaagccaattgtttttaatatccataacgacatttttcgtaaacgttgatccgatttgcacccctaatagtacaatccctaattcactaagtaagaatggccatttaatatcaagtttgaaaactttcacacaaatgattgatgcgataataggaccaaacataaatgggagtaatacgtgcgatgaatacaatataatactaataaaaaatgataaaacgaacacaatgaaattatttctatatatcattgtcatgttttccacttctttcaataaaaaataaaatgactaaattgctgcttgagcttcacgtttgttaagataacaatatccgctagcagttttgactacaaagcatatatggactttcactatcaagtcgccgcccatgcctgatatacatttaaaaagagcctgaacaaagttcaggctctcaatttgtccgtatatttattttacaatacgacttaaagccgtatcaaatgcttgaatcgttttttcaatatcttctttcgtgtgtgccgtagataagaatgtaccttcaaattgagatggtggtaaaaacacaccttcttttgccatttctcgatacatttctgcaaataatttcaaatcacttttattcgcttgttcaaaattagttacaggtccttcatttaagaaataaccaatcattgaacctgctctatttacagttattggtacattgtgtttagcaaatacacgctttaaaccgtcttcaagtatatcgcctaacatattaaaatactcatatgtctctggcgttaattggcttaacgtttcataaccacttgtcattgcaagaggatttcctgataacgtacccgcttgataaatatttcctaatggtgctatatgatccatgatttcttttttaccaccaaaagcacctacaggtagtcctccaccgataacttttcctaagcaagttaaatctggtgtcacaccaaagtaaccttgtgcacaatgataaccgactctgaaaccagtcattacttcatcgaaaattagcaatgcgccgtattcagtcgtaatatctcttaatccctgtaaaaaaccttcaatcggtggtacgacacccatattaccagcaacaggttctacgattacaccagcaatatcgtctccaaatttttcgaaagcgattttaagtgcatctaaatcattgtatggaactgtaattgtatttttagcaataccttcaggcacaccaggagaatccggcaatcctaatgttgccaccccagaaccagctttgattaataacgaatcactatgaccatgatagcaaccttcaaatttcacaattttatttctgccagtataaccacgtgctaatcttaaagtatccaatgtagcttctgtaccagatgacaccatacgcactttttctattgaaggtactcggtcaataacgagctgcgccaatttattttcaagtaatgttgatgcaccaaaacttgtacctttatcaattgcttcatgtaaatgactaataacttgagggtctctatgtcctaaaataagcggcccccaacttagtacatagtcgatatactcgttaccatcgatatcataaatttttgagcctttaccgtgatccataaaaattgctggtgtatctactgatttaaatgcgcgtactggactatttacaccaccaggcattaaagtttcagcaaccttcattgcttcttctgatttcgtatatctcataaagtaaattcctcctatagtttatggaaaatcatacatataaaaccttatttatctaaatagcgacaaatgtcctttgcaaaatacgtaataatcatatcagcacctgcacgtttcattgaaaccatttgttccataacgacacgttcttcatctatccaaccattttgtgccgctgctttagtcatactatattctccactcacattatatgcaacaactggaacattcgtatgatttttaacatctcgaactatgtctaaataacttagagcaggtttaacaatcatcatgtcgcacccttctttaagatcactttctaattcacgaagtgcttccaaacggttagcagggtccatctgatacgtttttctatccccaaatgatggcgctgaatctgctgcatctctaaaaggtccaaagaaacttgatgcatacttgacaccataactcattataggaatattgtaatagccggcttcatctaatccacgacgaatttcagcaacaaaaccatccatcatattacttggcgcaataatatcagcaccagcttccacttgagaaattgctgttttaacaagtagtggcaatgatttatcattgtcaacgtcatgtgtatggtcatcaatcacgccacaatgaccatgatcagtatattcacataaacaagtgtctgcaacaattaataagtcatcatacatttttttagcaatacgtgttgcctgttgaataacaccatcgtgaatgtatgcaccagtacctatatcatcttttgagtttggaacaccgaaaaacataatggcacgtatgcctaagtcataagcttcttttaattcactttcaagtaaattcaaactgatttggtatacacctggcaatgacttaatttcttttttcacatcgtctttttcaactacaaaaattggatatattaaatcttcttttcttacatgattctctctaaccatatctctcattgtcgctgatgatctcaatcttctatgtctatcaaatttcatttttagcccctactttctaaaatcttttcaattagtgattcgagtgtttgaatttctgcaattgttactggttgttgatatgttttaatggtccgtgctgtttgttctccaatagcaaaatacgacttgaattttggtacaaatccttcattaaaataataacgtactgccgacgaacttgaaaatgttaatgcatcgatttgttgatgttctatcatttctttaacatcttgtatattttgtttgttaggcactgaagtatataaatctattttaacaacttcattatctttagataacgctgctaataacaatggtctcgccaattcactcgaaggcaaaagtattttttggttagtttgattaaatgattttaaaaatccttcttgagaaaagtcgtttggcataaaatcaactcgaatgccaagtgattcacaatattgcgctgtcttacttcctatcacagcaatgttatcaacattaattccttttagatatttataaaagaatttcacagcatttttagatgaaaaaataagccagtcatagcgttgatttaacaaatgaatatcaaaatttagtggctttatatcaataaagggtttgtgaataattgatactaaatcactttgcatgtcatttgtttgtgtcataactacaactggcttcatatttaaacgtcactccattatttaatgttgttcatttaagcgttttataatttcataagcaccttgctcttttaatttgttactcactgttttgcctaactcaaccggatctgttccgttcattgtatattcaaatcgttctttaccatctggggtcataattaaacctgtaaattcgatttctttttgatctgagattgtagcatatcctgcgattggcacctgacaactaccatccatttctgctaaaaacgttcgttcagcagtcacacattttgcaacctcatcattatgtactttgcttaataatgttaatagttcttcatcgtcactacgacattctatccctaaagcaccttgtccgattgcaggtaacaatgtatctctatcaagataagatgttacaatatcatctgaccagcccattcttcttaaaccagctgcagctaaaataatcgcatcataatcttcagtttgtaacttttctaatcgtgtatctatattacctctaatccatttaatctctaaattaggatacttagataatatttgtgcaccacgacgtaatgaactagtaccaataatactgccttctggcaattgggatagtggtgtatgtgttttagaaatatacgcatcaaaaggtaattctctatcagggatacaacctaatgttaaaccttccggaattacacttggtacgtctttaagcgagtgtattgccatatcgatatttttttcaaaaagttcatgttgtatttctttaacaaataagcctttgcctccgactttagacaattgtttatctactatacgatcgcctttcgtgacaatttctttaatttcaatttctagatttggctcgacagcttttaatttattaataaattgctggctttgtgttaaagctaatttacttcttctggagccaacgactaatttacgcatgttcaattcctcctaggaacggattgctctagattattttctcaattcacaaaatgtgttgcaaaaaataaattaatcatatttaagcaaaataaaataatgttatagtatattaaataccttgaattcaaccatttgttgattctaagcaatatataacttccatataatactgtaataattgaagagagtattaccttcgggtcaatgaatatacgttcaccaactgaaattacaccccactgtgtacctaaaataatactaaatatgagaattatccacccacttaacgttgagtaaaacacaattgattcaagtgtagcaacgctacctattctaaagtatttttgatcaaaacgtttttccttcaaattacggtattgcatgatatacagtaatgcattgacaaaagctaaggcaaagaagacataacttaacacagctagaccgatatggactaacagtaactcgtctacaacagcaattttctgaaccttattagtataatgtgtcggttgaaatgtattcatccctaaaagtgttaaccctattaaattcaagaaaaacacagagaaattcaatactttgataaggttaagaattaaagagattgaaataatcagccaacttaaagtatagaatacatctgaaatagaccctaatggaatatgtctagtttgtataataaaaatagataaagagattgtttgtaaaacccaaacaatccccaataaatatatgcctaaacttctaatcttatgacttttttggacaaaatcataaaaatagcaaatgatactgattaagtatattaataatataatttcattgaatcgaataaacaggttttcttgcatattatcaccatattaatatgcttattcaaaactaaagatacgtcgcgctgaaatttccttgaccttgctttctttttgttgcttcgcttgctcatgaggacattcagcttcgatatcaaatatattttgaaatagctctaatttttcattacttttcttatcactacttaattctttggcctgtttaataggatctttcaacatttgattgatgatactttttgtatgtttagatataattttacgttctctttcgcttaaccctggcaatttacgatcaatactgtccatcgtttctgcttgaattgccatagctttttcacgtaaagctctaatcactggaacaacacccaacatactaatccactcattgtgtgcatgtatttctgcaggaatttgttccgaaattgttgcagccgctaattgtcgctcacgtaagtttgcatcaactaaaccttttaagtcatcaacatcataattaaagatgtttgtgatggcactaataccaggttcaatatctcgaggaactgcaatatcaatcaatactagtgaatcttgctttctattttctgcaattctttctatcatttcatttgtaatgatataagattgtgcactcgttgaactaatcacaatatctgcactttcaagtaaatttggtaatgatgatagttcatcatatttcacttgatgctttgctgctaatttcatagcattttcaattgttctatttactactgtaatatcagtaattccagaaccaagaagatttaatagtgataattcactcatttcccctgcaccaataatgatagcttgcttacttttcaatttgccaaatacttttttcgccaactcgaccgcagcataagacacacttacagcattatcagctatatctgtttcattatgtgctctttttgcaaaagtaattgcctgtttaaatagatgattaaaaattgttcctgtcgtacctgtgctttgcgctaagaaaaatgcatctcttatttgacctaaaatttgagtttctccaagtacgattgaatctaaaccagaagtgacacgcaataaatgttctactgcttcgtcccccacttttacttctgacattgctttaatatcatctacttcaaatccaaatgcacgagctagaaatcgttgaatatagtaacgacctgtgtgaatttgatcaacaacagcatatacttcagttcgattacatgttgataatatgacattttctaaaatagatttagtttcatataaatcttcatgggcaattcgtaaggcatcatctctaaaagcaacttgctctcttagtgcaacatcagctgtgcgatgatttatactaattgcaataaaatgcatttgaaacgcccccatatatactaacaatacaaatattataacataatttaaaatccaattaagtacgatgcttaaataaattataatctttctaatttacttttgagtttttgacaaaatgatgaacgttgaaaaatgttatcaattgtgtactaattaaaagtttcgtgcttacattatttttaaaatttttgtataagttttgtcgtacaaaaactatgaaatatacggttcaattaaattccatatttgttgttgtttattattttgaattgatgaataacttacaattgtatcgtctgggtccatatctaattgtgtcttaatatttttaatatgcttttgaactttaccttttggaattttgtcttctttagtgcatataactaaagtaggaatatcaaaatgtttcaaataattgtacattaagatatcatcttgtgttggatcatgtcttaaatcaactaattgaataactaattgcaaattctctctcttagttatatattcctcaatcattttcccaaatttttcacgttgtgttttacttactttagcatatccataccctggaacatccacaaaaataagttgttcatctatattataaaaatttaacgtttgcgttttgccgggttgctgtgatgtacgtgccatattttttctgccaatcatactattgataaatgtagacttacctacattagatcgaccgctcagtgcaacttcagacaattctgtttctggatattgttcttcttttactgcactaatgattaattcaatattattaggattaactttcattttatatcctcacttttttatattctctttcaactctaccattatataatatttgaacctttcggtatacattataaaaaagctccgatcaaagttaaactatttgagcgtcaactttgattggagcttttcacttttataacacatcaatgattaagctgatgttttactattattaattaaattgccttctgcgtcgtatagttctggttcagtttcttcattaattgtttgtgctgtaataactaccttcgttacattttcgttagaaggcacatcaaacataatatcgattaacgattcttctatgattgaacgtaaaccacgcgcacctgtttttctttcaattgctttttcactaattgctgataaagcttcttcagtgaactctaaatccacatcatctaattccagcattttagtatattgtttcacaagtgcatttttaggttgcgttaagatgtttttcaacgcagttacatctaatgtttctaaattagctacaattggcacacgtccgataaattcaggaatcaaaccataggcttgcaaatcttctgggcgaatttgtgctaataatgcttgttcgtcatatttatcagcttcattgcttgagaaaccaataactttttcaccaagacggcgcttaatcacttcttcaataccatcaaaggcaccaccaagaataaataagatatttgttgtatcaatttgaatcatttcttggtttggatgtttgcgtccaccttgtggcggaacacttgcagtcgtaccttctaagattttaagcaatgcttgttgaacaccttcacctgaaacgtcacgtgttatagatgtgttttcagatttacgtgcaattttatcaatttcatctacataaataatacctttttcggctttatcaatgtcaaagtcagctgcttgaattaatctcaacaagatattttcaacatcatcgcctacataaccagcttcagttaaacttgtcgcatctgcaattgcaaatggtacattcaacgtcttggctaatgtttgagctaataatgttttaccactacctgttggcccaattaatgcaatgttacttttttgtaattcaacatcatcttcttttggtcctaattgttgaatacgcttatagtggttataaacagctacagctaaagattttttagctttttcttgaccaataacatattcgtttaaatgatccataatttctttaggagtaggtaattctgtcatcgcttcagaagtgttttgagctaattcttcttcgacgatttctgagcataattcaatacactcattacaaatatatacaccacttcctgctacaagtttttttacttgatcttggtcttttccgcagaaagagcatttcaaattttcttcatcttcattgaatttaaacattctttttacacccctattcgttaaagactatactagattggatattacaatgcaacatattaacatacaaactttttgcttaaagaatagtagcagatacataagctatgcatctgctactcatttttgtaatttaatatttaatgaagattaatcttctttagttccttcaacgaactttgcgttatctcttaataaatcgataactttttggatacgaacatcatttttaatgatatcagtattacctaaagtatttttgatatcttcaactgagatattaaattgtttactcattttttctaattctttatcgatatcttcatcagtagcttcgattttttcagcttcagcgatcgcagttaaagttaagttagttttaacacgttgttctgcatcgtctttcatttgctctcttaattgagtttcatcttgacctgagatttggaagtacgtttgtaaatctaaaccttgttgttgaattctttgtgcaaattcagacaccatacgatctaattcagtattaaccattgcttcaggaatatcgattgttgtattatcagtagcttttgtaatcgcttcttctttttcaacattttcagcatctgtagctttttgttcagctaaacgtttacgtaagttttctttgtactcgtctactgtatttgcttctgcatctaattcattagcaatttcatctgttaattctggaacttctttaaatttaatttcgttaacttttgttttgaaagttgcttctttaccagctaattcttcagcatggtattcttctgggaatgttacgacaacatctttttcttcgtcaactttcataccttctaattgctcttcgaaaccaggtatgaatgaacctgaaccgatttctaaatcgtaaccttcagcttgtccaccttcgaattcttctccgtcaactgaaccactaaagtcaatgttaactgtgtcgccattttcaacaacaccatcttctttaactaccatttcagctaaatgtcctaagctgtggtcaatcgcttcttgtaactcatcatcagataattcagtttcttgtttttcaatttcaagacctttatagtctcctaatttaacttctggctcaactgtaactgttgcttcaaaaatgaaatctttacctttttcaatttgagtaacacttacttctggttgtgcaactggtttaatatcagtttcgtcaattgcttcaccataagcatctggtaataaaatgtcgatagcatcttgatataatgcttctacaccaaagcgttgttcaaaaattggacgtggcactttacctttacggaatccaggtacgttaatttgtttaaccacttttttgaatgcttgatctaacgctttgtttactttttctgcaggaacagtaacagttaataaaccttcgttaccttcctttttttcccaagttgctgtcatgtatatatacctccatgattaactaatttattttttcaacttccctattatatcataggtctattccctatacaaacattgaaatcacaacgtttatatatttgtaaatcaacttttttcgtcaaaactatattaaaatgctgagtattattttgcaacaatttaactattattattcaaatctaattgctgaataaaattaaatgcatcgatactttgtaattcacatttaagtcctaacatatttttgaaataacattcgtatgcattaatccatttattcgtttcaaacaaagtttcaatatcaattggataaatcatgatagagtgattattcataatatggtgtgcttcttcagcgatatgtaatgcaccatcatttaatgtttccataacgttaggtataactttttctttcagtgttgtatgttctagcccatttaaattagctggtacaaaagttacatccataccatacttttcaattgtcagttcttgtgtacaatttgcaaaccttaaatactcaatcattaaactaatgaggttataactgtacgtattagattttaatatatataataccgtttcttgaaattgaaaatgaccattgtctattaacttcaaaatcaagtgcgtctgttccctcattgataacgtatcaaaatcagttaatgactgagtcaatcgtttttcatcttcaattaattttgacttagcaaattctttaagaggatgtaatgccattcttgttttgtgatctttgacttcatcaataatttgatgaattacttctaccgcttcaaaatattgtcccaaaccaatcaaacttttcacgtaataaatcatcaatgcatcatattgttgtatgccagttttcaataagacaattgtttcttctcttaattcaagaaatgaccccgtctcatataacatacggcatttcatcattgctatttcttcagtgagttcaaattgacgttcatattgcacaatatattcatacatcaggtcatagttttggtcttgttcagcacgttttatatctttatataactttttcgaagagttaggaaactgaataatatctgacatatatgtcacctcgtttgattataaatcttgaaggattaatgcgctccacgtttcgaaatcatcatatgactctatgttgcctttttcaacccattttattcgtaaagtatctgtttctttagcttctacatcattcgtacttacagtgattttaaatacaacaccaatatgtaccttgcccacttcattattatcgtcattaataaaaccgatatattccatattttgtgaatcttgctcacttaaacctacttcttcttctaattctctctgtgcattaactctcaatacttcgttaatagattctgctcctggaacatcattcatatgaccgcctacacctattgaagattgtccatgcaatcgagcttctccaccgccagataatcgttcatacactaatatctcgccatgctcattttcaagtaaacaataagaaatgagttgtttatatgatggatcctcttccatatcgccgcgtcgcttaacttcatattgacttagcgcatcaaaaatattttgaccttctggtttattcttatttaaaaacccattgaaagtattcttttcattattaaaaataatttctctaggtactacaatgatttgttcatcaaatttagacatcgtataaaactcctcactttaatgtttgttctcttaaatgcattttagcaaatatgtcatattttagcgattaaatgtggcattttgctttttaaaaaataaaaaagagatgacaatgccatctcttttttataagtgttattattttaaagcatctttagctttagttactaattgagcaaatgctttttcgtcagaaattgcgatttctgataacattttacggttaatgtcgataccagcttttttcaaaccgttcattaaacgtgagtagctcatttcatgttgacgagctgctgcgttgatacgtgtaatccataatttacggaagtcacgtttacgttgacgacggtcacggaaagcatattgacctgatttcattacttgttgcttagctactttgtataatgtatgttttgaaccgaagtaacctttagctaatttaatcgtttttttacgacgcgctcttgttactgttccacctttaactcgtggcataaaaaattcctccttaggtaattcctaccgatttctgtatttgttcttattttttgtatgctaataattgttttacacgtttcatatcgctcttagacactaatctagctttacgtaattgacgtttttgtttagtgctcttgtttgcgaataagtgagatgtgaaagctcttgaacgttttaattgacctgaagcagttcttttaacacgtttagctgctccgcggtgagttttcatttttggcataatataagtcctcctgtaatagctttaattatttttcagctgttggcgctaacatgataaacatttgacgcccgtccattttaggtttttgttcaactgttgctatatctttgcattcatctgcatatttttctagcacacgttgaccaatttccttatgcgtaatggcacgccctctgaaacgaatagatactttacatttatcgcctttagttaagaatttacgtccgtttttcaacttagtttggaaatcatgttcctcaattgttggacttaaacgaatttctttaacattgataattttttgtttctttttcatttctttttcttttttctgttgttcgaatttgaatttaccgtaatccataattcttgcaactggtggtttcgcattcggtgcaacgaccactaagtctaaatctacacgttcagccatttctaaagcttcacgctttgatttaacaccaatttgttcaccatcttgaccgattaaacgtaattcttttgcacgaattttgtcattgatttgagtttgatcttttgctatggttgacacctccaaaatttttacgaaatttgcaccaagcaaaaaggaagagcaggtataaaatacccgctcttccttatacacagttatgtgtaatgtgattaacctgccaactgctttatgcgtcgctacaggtgagaagcgggtgcttctacttggttcgtttcgtattcaacgttgttaatcatatcaacaattcacatttaagtcaacactataactgtaattatttttattttaaccttttatttcatccattgacacgtcttgacgtaaatctacttgttctaatggaatttttttcgttttatatcgaagcttatgataaataaagaatgctaaaaatactggaattcccatatacgtaattaagaagcgactaaaattaaaatctcctgttttaataaagtcaacatcttgaccaataattactacaatacataaaaagccagcaaataatggtccgaatgggaataatttagcagtatattttaatttagatttgtcataattttgtttatcaaatgctcttctaaatcgataatgacttactgctatacctacccaagcaataaaaccagttaaaccacttgctgcaacgatatattcgtatgcaccttttgtaaggctttgtaatacgaaaataatcactacaatgattgctgtaacgagtaacgacatatatggcacaccgtttttatttgttttaccaaatgcttcaaacgctaatttatctttactcattgaatatagcattcgggttgaagcatacatacctgagttacctgctgataacacagacgttaaaatgactgcattcataaatgatgctgcaaacgcaaatccagcatttttaaacactaatgtgaatggagacgttgctacattatcactaccacccattaatgcactactatcataaggaattaacataccgataacaaaaatggctaaaatgtaaaataataaaattctccagaatacttgtttaattgctttcggcacagcacgttcaggattttctgattcaccagccgtaataccaattaactcagtaccttggaatgagaaaccagcgattaagaatacacctagaattgataacaaacttcctcctaagttgccaccaagaataggaccttcacctttattaaatatttcaaatcctacaacatgaccacccatgattcctacaatcgttaataaaccaattgcaatgaaaacaataactgtaatcacttttatcaatgccaaccagtattcactttcaccatagacgcgaactgataacgaattcagactaaaaattataactaaaaacaacgcactccatgcccaagcgggtatgccttgcaatggtgtccaatattgaatgacttgtgctgcaatcgtaatatctgctgctacagttactacccagttaaaccaatagttccaaccaagcgcaaaccctaaagatggatcaacaaatcttgtagcatatgtactaaatgaacctgatactggtaaatacgtagccatttcaccaagtgacgtcattaagaaaaataccattattccgataattgcgtatcctattaatgcacccaaagcacctgcatcatgaattgctccaccagaagttacaaataaacctgtaccaatacaacccccaatcgcaatcatagaaatatgacgatctttaagtccccttttgacaacattgttactttcattttgaacttttgacatataagctccctttccatgttttagaggccaagaaataaataacctttattcactttcatacccttttttacagaacatagtgatattaaaagtaaaaaagtggctacatacctttaagatatgcaaccactttggcaattatctatataaggtagcacatcacattctgtgacagtacagttcctattcgaaaactgtcccaatagatataatttatggtttatatctatttcggcatctttacctttcacttgttcaacttatgtaccataaatacttctgacaagttactaattaaacatgcaacctctaactcaatttaatattttaactaacttgtaatatacaggattcatcacgcataatcaaccctgtaaaacttgatacgcaataaaagttttaaagcattttattgcgacaactgtctatctatgttttttcaaacgaatttcatcaactagattccagataaattcatctttttcaactgtttcttggtcttgcgatccatattgacgcacattcacttgattattttcaacttccttatccccaactacgatttgataaggtattttttgcatttgagcttctctgattttataacccattttttcattacggtcatcaatacttacacgaacaccttgagatttcaattcatcttgcaattggcgcgcataatcataatgtaaatcaacgttaactggaatgatttgaacttgttttggcgctaaccaagttgggaatgcacctttagtttcttcagttaaaaatgctacaaatcgttccattgttgatacaacaccacgatgaataacaactggacgatgatgttcaccatcttgaccaatataagttaaatcaaaacgttctggtaataagaaatcaagttgtgctgttgataatgtctcttctttacccatcgctgttttaacttgaacatctagtttcggaccatagaatgccgcttcaccaatcgcttcttcgtacgataagccaagctcatccgctgcctctttaagcatattttcagctttattccacatgtcatcatcatcaaagtacttttctttatcttcagggtctctataacttaatctaaagctataatcctcgaaaccaaagtctttatacacatcaataatcatgtttacaacgcgtttgaattcttctttaatttgatcaggtcgaacaaagatatgtgaatcatttaaagtcataccacgaacacgttgtaatcctgatacagcaccacttgcttcatatctatgcatcgttcctagctcagcgatacggataggtaattcacgatatgaatgtggtttattcgcataaatcatcatatgatgtggacagttcattggacgtaataccatagattcagtttcatctaactgcattggtgggaacatatcttcttgatagtgatcccagtgaccagatgttttgtataaatcaacattagcaagtactggtgtataaacgtggtcataacccatgctcacctctttatcaacaatgtaacgttcaatttcacgtctaattgttgcaccgttaggtaaccataatggcaaaccagcaccaactaattggctatttgtgaataattctaactctttaccaattttacgatgatcacgttctttacgctcttctaacatttgtaaatgtgcttttaattcttttttatcaaagaaagcagtaccgtatatacgttgtaacattttgttgttactatctccacgccagtatgcacctgctgtagataatagtttaaactctttaattttagctgttgatggaacgtgaactccacgacataaatcagtaaaatcaccttgactatataatgttacattttcatcttcaggaatcgcgtcgattaattctaatttgtattcatcattgctgaataactctttcgcttcatctcgtgaaaccacttttcgttcgattttcatattttcgttaacgatttgtttcattgttttttcaatttgttcaaagtcatcagatgagatgttttggtcaatgtcgaagtcatagtagaatccaccttctattacaggacctacaccaaatttaacattaccatataaccttttaatcgcgtgtgccattaaatgtgcagtagaatgacgtaatacctctaacgcttcttcactacctggtgtcacaatttcaattgatccatcagtttcaagcggtttagttaaatctacaagttgcccgttaaatttgccggcaacagcttttttacgtaatccaggactaattgattgtgctatatcttcagtagtagtacctttatcaaacgcctttttattaccatctggaaattgaatattaatttgttccatgttaaaccctcctatttgctttataaatacttttatctgacctcgttaaaaaattgaacaacaatcatcgttttaacattaaacctattaacaataaacagggaatatatgacaccaacaaacatttatgtctgaaaaaaacaaaaaatcccgcccctatacaagggacgagatcgtcgtggtaccaccctagttatttaatacaatttatgtattaaatatctctgcttaagataacggtcttgatccgggtattcattacaaataccataaatgaagtagtaatcatctaatttattaaccatattctcatcaaacaatggctttctgtgtaatattgattagatcatcttgtcttcaatcatttaaacgatttagatttgtattcattatacaccaatcattttaaaattcaattgtttctgaaattttctcctgataaaaagtatggtgttgacaaagatttgacacgttcaataatacgtgctgctttagtcttctcttcaccatcacgagtcatcgctaaatgatgttccaattcactatagtcaaaattagaactaaagaatgttggtaattcatgaaccattcgatagtgtagcaaaggtccaattacctcatctctcacccatggagtcacttcttcagccccaatatcatcaagcattaaaatgtttgcttctcttacgcgatgtaatttcttttcaaaagaaccatctttaaagccaccttttaatgttctaataaattccggtaaataaataattgtcgaacgtaccttcttagatttgagctgattcgcaattgcacctagaataaaagatttacctgtcccaaatggaccataaaggtaaaggcctttcacttgttccccattagttattgctgtacaaatatcatctgctgccatagctacatcaagacggtctcgatgattcatataaatatctttcaatttggcatttaaagtatctcgttgcatatgatgagatgtaattagctcagcttcaaagcgttcttcgtcgtacttgattttacatgggcattgtaaatagcgtattttaattcggttattatcaacatataactcaggcacatgcccctttacgaaatttggacaatcagcaaatttatgaccgtcataatgtttttgttgatctttatactcttgtaacacatttaagtcttcatcaatcatagcattcgttaattcagctcgatgcgcttccaaaaattgcttaacatctgggtcattgattacttctttttttatcttttctattcttttttcaaagtcctgcgacgtgttaattatacttttaaattgcttcattatcgactgtcctcctcccattttttagataatttatctagaaatgcttgtcgatcttgctctaattgttgatcatctacgctattatctttagccgaatcttcttcactaggtttatctctattttctaaccatttaggtgttttttcttttgaaatacgattacgttgcccatagtatgaaccacgcttttggtaatttccgctagaaccctcatttttaggttgattaacttttttagcgtaattatatgcttctttagctgtcttaataccttttttcttccaatttgatgctatttccaaaatatacgctttaggaagtttcatatcttcttttaacatgacaaattgcaacaaaatattaatgacgccaaaagacattttttcacgttcaattaattcttcaaccattgtcttttgcgatatagttggttctgattcagaccaagaagctaacatatcaattggactcgtttgttcaagtaactcaaaccattcatcactttgtggctttggattcacttctgaagatttgcccgtcgaagatgatgtagcaggagatttcacctgtaatttaggcatttgattttcgtgttccattaaataatacgagcgtgcttgtttacgcatttcttcaaaggataactgttgtccacttgtaattgaatttaaaataacatgcttcatgccatctgctgttaaaccatataaagtcgcgagttgtgtaattaaacgctttgcatctttggtaacaatgtcttgactaataaaatgtttacctaacatttgtctcaacatttcaaagtcaaaagattcatttgataaatcgataccttggtacggttcattaatcggaatatcacttgtatcgatatctatttttgtagacggcactttaaaaacatcagtaaattgtcttgttacctgtttaaattcactcaaatcaatttgttgatactcaaagtatttcttcaactcatgaaatcgacgatgctcgacttcactatataaaaagattgacaacattggatcattaaaaaataaatgtgctgaaggcggttgaattaattggtaaacaaattgtgtttcttgttcatcatgtttgacaaacgcctttaacaatccaatcgcttcaagtaagtccatttgttgtctaaactctagtaaattaattttaagttcattcataaaaatataatgagaaagaatcaatgtttcattatgactgtctttaacgaattgagtcataaaatgatataaacccactgcttgcgttccaattagcggtgtatacagtcgattcaatacctctaaatgattcgtatttaaatcaaagtgttgcataactttgaattgatcctttggtcttaagccgaattcgaaggcttgtcgtcccatttaagcatcactccgtttgttttcgcttaaaatcccttgcatcgatgctaacaattgatcaacatctttaaattctttatagactgatgcaaatctaacatatgaaacttgatcaacatgcattaacaagttcataacgtgttcacctatatctcgtgaagacacttccgtatgaccttcatctcgtaattgccattcaaccttgtttgttatgtcttcaagttgttgatatctaactggtcgtttctcacaagaacgcacaagtccattaagtattttttctcttgaaaactgctctcttgtgccatcttttttcacaactataagctgactaacttcgatatgttcaaatgtagtgaaacgtgttccacaattttcacattctcttcgtcttcgaatggcatttaattcatcggcatgccttgaatctacaactttagattgtgtagaattacatttcgggcatttcattacatcaccctctttattttgattatgcctaattatactataaatctagagatgaaaaaagaatccctcaatttaattcatttaaccaaataatgaaacaataaaaaacattatatcgttacttattaagtaatttgcatgacaatattattgtattaaaaaataaaaaacctaactccgaagtcagagttaggctataaattaattgtattaacttgcacttacagtttcttttgatgtcaaaagtgctccaatttgctcagcaacatctacaactctatttgaataaccccattcattatcataccaagcaataacttttactttattccctgacatgaccattgttgattttgcatcaataatagctgaatttggattagtattaaaatcaacagacactagtggttgatgttcgacttctatgataccttctaaacctgcattttcaaaagcttggtttacttcttctgcagttacttctttttctaaatcaacaactaaatcaacgagcgatacattctttgttggtacacgtaatgccatgccgtgtaatttaccttctaattctggtaatacttcttttaaagctttcgccgcaccagtagaagtaggaataatgctttcattacatgaacgtgcacgtcttaaatctttatgtggattatcaatatttttttggtcatttgtaatagcgtgaacagtagtcattaaaccattaactattccaaactgattatttaaaacttttgcaactggaccaatgcaattagtagtacatgaagcattactaaaaatgtcaaatgcttctatatctaattggttatcatttacgcctttaactaacatttgaacatgtccaccttttgaaggaccagttaacaatacttttttggcacctgctttaatatgtgcgatggctttatcaccatgattaaatttaccagttgcatctatagcaatatcgatatctaattctttccatggcaagttttcaggattgcgatcagcaaccaatttaattttatgatcaccaacttgcaatccattttcaatcggttcaacttttagattatattttccatgtgttgtatcgtaattgattaaatgtgcaattgtttcgggtggataactagcatttatcgctactacatttaaatttttattttgtaatgcaatacgtaataccattcttccaattctacccataccattaattgcaatattcgttgacattaaaagcaccccttgatttttatgtgttatactttatggaattagtatagcatattatatgaattttgaaagcgttttccgttgatttatttatcttttttataaaaaatagtcattacttacatacatcaacgcgtacgtaaagtaatgacttatttatagtgtaatattaatcttcttctccgtaattcggcttttcaatataaccttcttcttctaacaatctctcaaggttttgttttaattcaagtttatcccctaaattatcgataacatgatcggccattcggctttttttatcaatagaaatttggctatagacacgtgctttcgcatcttctaatgacagattattacgttgcattaaacgatccatttgtatactttcagaagtgtatacaacccacacttcgtctactgtattttccaattcattttcaaataataatggaatatccatgattacattatatccttgttttaaatattcttgcttttcttcttccataatatctcgcacgataggatgtatgatagcatttaattctaagcgtttttctggatggttaaacactaaatcacccatataacgacgattcatctcaccattttcatcaattgcttcatcaccaaagacttctcgtacttgagctaaacctttactcccctttttaacagcttccctggctgctttatcagcatctactactttaaaaccgaatacggataagagttctgatactgttgattttcctgaggcgattccacctgttagaccaataactttcggcataatttcactctttctttatttttgacatactggacaataatgactatttcttgtcgcgatgatttttgtttcaatttgacttccacacactttgcataccggctgcttatatacattaagatgcaattgcatctcaccagtttttccatcagcatgacgataatctgaaatacttgtaccgccatgcttaataccttcttctagtacttctctaacataataaaaaaccatttcttgttgttggtgtgttaagtcttttacttttttatctggtaaaacacctgcacgaaacaacgcttcacatgcgtaaatatttccgcaacctgcgattactttatgatccaaaatcacttgtttgattggtttattcttattagactgttgatgaattcgatttaaataatacgtcaatgcttcatttgtaaaaggttcaggcgctatttctaaaaatgaaggataagatgctacagacgcaacatttctaatttctccaaaacgacgtatatctgaataaattaactttttgtcatttgacaactcaaaaataacatgccaatgcttacgataattaggtatcataatatcttcaagttcatctacaatgaaaaaaccacccgccatacctaaatgactaattaatgtacgttgttctcgtttattatctagctgaaaaacgatatatttacttcttcgttctacatttgtaatggtatagccttccgataaagttttaaaagtatctaattcaattccttttataattgtttccttgccttgagctttaccttcgattactttatccgaaaatataacgtgttcaattttttgatttataacgtagggttcaattcctctttttacatgttctacttctggtaattcgggcataccattaacctcactttattttgcatcataccaagttgcaccataacttgagtctacttttaatggaacatctaattgcaatgcattttccattatctcttctacaaattcactaaatgaatctacttctgacttaggtacttcaaaaattaattcatcgtgtacttgtaataatagtttagcttgatatgttgtctctttcattttttgtgcaaatttaaccattgccagtttaatgatatctgcagcactgccttgtattggcgtattcatagcagtacgttcagcaaagccgcgtaaattaaagttacgactcgtaatatcaggaatatagcgtcgacgatgtagcaatgtttccacgtaacctaaagctttggcatcttttacaatatcagacatatattgtttcacacctgggaaactagctaaataatcatcaatgaatgcttttgcttttttacgagtaatacctaaactttgacttaaaccataatcacttatcccataaacaattccaaagttaaccgcttttgcttgacgacgcattaaactatcgacttgatcagcctctacaccaaatactttcatagcagttgctgtatgaatatcatcgccgttgataaatgcttctttcatactctcatcttgtgtaatgtgtgctaatacacgcaattcaatttgagaataatctgctgataatataacgctatcttttgaagttggtttaaaggcttttcttattttacgcccttcttcaagtctaaccggaatattttgtaaattaggatctacacttgataaacgtccagtttgcgctaaagtttggttaaaacgtgtatggatacgttgatcatcactaattaccttttgcaatccttcaacataagtagactgtaacttagataattgacgatattctaaaatataatcaatgataggatgttcaccttgcaattgctctaagacatctacagcagtagaatatcctgttttcgtctttttaataacaggtaattgtaatgtctcaaacaatacaacacctaattgtttaggagaatttatattaaaatcttcaccagctgcatcatggatatttcgaatcaagacgtctaatttttcttgaatttctttttccatttcttctaaatcatgaacatctgtaaatataccaatttcttccatttcacttaaaatcttagctagcggtagctctaaatcagctaagagttctacctgattgtattcttctaattgtttatccatatttggtttcgcaaagtaaattgcatcagtaatagaagcaacatatggatttaaaacatcatcttcaggtaccttaaatttcttaccttttccatatatacttacatcgtctttcacaaaactttgaccgtacaatgaaacaactgattgaacatcactaatcgtacgagatggatcaattatataactggccaacataatatcgaaagaaatattttgaatatcaattcccaatctatgtgatgctacatatgtttttttagcatcatatacgacttttttcgtattcggattttctaaccatgaaactagttcggcataattatttatgtcatccgcattaattacaatatgtttctcacctgtaaataaagagaattttaaaatattatttcgcaaatagttaccaccgtctaattcgaaatggatggccgcttctttcaatgaagtaaaatcaatattatcaaaagacgtttcaatttcaaatgtcttttctattgcatcttcaacgcttgctgattgatcaatgtcagacaacaattgtttgaattctaacttcttaaacaattcgattttttcttgttgttcatcttgatgagtcattaacgtatcttcaagttttacttcaatcggactatctacattaatcgttgctaattctttactcattaatgcatcttctttgctattttgaagtttttcttttaactttttacctgaaatttcatctaaatgttcatagacaccttctactgtgtcaaattggtttagcaattttattgctgttttctctccaacacctgcaacacctggtatattatcagaagtatctcccattaatcctttcatatcaataatttgattaggtgttaacccgttgtatttttccgcaataaagtcaggtgtataatgatcaacatcagtaacaccttttttagtgtaataaatggttacattatccgttgcaagttgtgttaaatctcggtctcccgttataataattgtctgaaagcccgctttatctgcttctttacttaaagttccgataatatcatctgcctcatagttatctaattcataacgtttaatatgataagcatctaataattggcgtatataaggaaattgctcacttagttcaggcggcgttttctggcgtccacctttatattcactatatttttcatgtctgaaagttgttttacctgcatcaaacgctactaaaaaatgatttggcttttcttcttttaaaatcttctctagtaacattgcaaaaccatatactgcattggtatgaatgcctgctttgtttgataacaaaggtaatgcataaaaagctctaaaacttaagctattaccatcgattaatactaatttattcacaattttaacctccagaactaatttatatatattttagcatattcgactgtgatgtcgtaattaaagaaactatctcatagagtatttatacacgacctaatttcaaataaaacaagtgcctatatagacttagctaaaaaataaaaaagacataatcatgattgttcttgatgagcactccataaagtcaggttaaaagtccaacttttgagatgcacattatcatttcatgattatgtctactttttaatatttttatgctgctattttaaatttttataggtaagaataagttatgaatcgtctgaaccaaatggaatatatttaactttggtcattttcggtaattcttcataattattaaaccactcttggtaatttttattgattggtgacggatgatgcatataatgttcaaacggcaatgattccactgtataaacctcttgtcgtggatgatctttaatttgttgttttaataactgaactcttttttcatgttcataatgaacataaataaatgcactaagatatatcacagctaaaactagtgatgcacctttaataaaattaacattgattgacttatatttccgaaattcttttaataaaataattaaaatgattacatgtatcgtataaacaatcaaaaaattacctggttctattggagtaacaatgactagtgtcgacgccgaaacacatattgcaataagtaaggaatataaagtgatttgtgttttacgatcattaatagacaaataaatacctacaaatatcgaaaacgcaaagtaaccacatacaattacgttcacaaaaccaaccaatccaatatctgtatttttatttaataaaaactgattgtaaaatagtaaataataaagcggtaaagtgataaatcctatcataatgatacgacgctttaatattgttaaatgtacataccgatcacttctaagcagtagataaataataagcgctgcaatcatacttaaaattataatctgactgaaaatgacaccatatggaagtgacgttgatatcatttctgcaaattttgaaaagataccttgattatttgaaacttgttgatattctgatccttcaaataaaattttgcgataatttggattggaaaacataatgattgtacctatagtagcaatcataaatgaaaacaataatttataattaagtgttcgatttgcagtaaattcatacagaaaagctaaaattaaaatgatacagtggaataatgtcacattctccataaataattgaccgaagaagcataaaacatagaatagtacagtaacacttaccggctgcttttctttatatataattgcattaatacaataataaataataaagagtgaaattagtgttgatgtcgcataattataaaatcctgcaaaccagccatatgtatctgcataaatagcacttggtaaaattaacattaaagaaaatgctaacaaataatagcttgtccacgctttacaacgtgtaatgtgcataatcatccaaatgatgcccatactaatgagaccatatgaaagccaacgtaaccagcttacatgtacagctataatttcaaagatatttccgatatagcgaccattaagtgatgcaaatcctacttttaaaatatcagtattataattgctaaaccattgtaaatcatcgtgcatgattggtagtaagatacccataaaagtataaaacaataatatcgcaattaatatcaaagttgtcttgtgtaattgaattgttttcactttgctaatcctcaaatctagttaaattttcctcaacttgtaggtcgaaaaattaattcaatatttttaatgtatttctaattttcacctatgcatgtttcctcaatcaaattagataaacaaggtatttaatattactttcaacaatttatctaaatcgcccctcgtctttttctatgacgaatgattacacttgtgtattcaagtgttcaaattaagatttatttccgttcaaataaaacttattactttttaattaagcatctattttaagcgcattactaaaatttctttattataataaatatattataaaattgcttgattcacaacaatctattacttataacttacaaaacgatatatgctaatgacaaaattgacaaccgaatttattccaattcattaactctaatttaataccaatagagatttgaacgaaataaaaaagcagcaacaacttcgtgaaaaatacacgcgctgttaccactttaatttttattctttataatcttttagaataactttgaacgttgagcctttgccaacttgactattcacttcaatattgccttggtgggcctctactatatgctttgtaattgataatccaagacctgtcccaccagaatctctacttcgtgctttatctactctataaaatctttcaaaaatacgttgttggtcttctaatttaatacctataccaaaatcttgtacttcgaaaatgacacgaaagtcatctcgatacacacgaacgttaatatctccatcttcataagaatagttaattgcattcgttaacaaattcgtgataacttgagcaattttactttcttgtgctttaacaatgacatctttttcaatatcagtatgaatggaaatatttttttgattggcttgagtcatcatattatcaataatacgccgcgttaaatctgataaattcatatagtctgtatctaactctgtatgttgctcaatatgcgataaatctaacagatctgttactaaagattctattcgatttgattcttttaaaattatgtttaaaaacatgtctaatgattccgcatcattttttgcaccatcaataagcgtttcagcaaaccccttaattgaagtaataggtgtttttaattcatgtgaaacatttgctacaaattcacgtcttagattttcaagttgtttcagatttgttatatcatgcatcacaactaaaatcccttgcaaacttttttgagacctagttaaaatcggaacgcatgaaatatcaaagtacttggcatggacttggtttattgcaacttccaattgttcataaataggtttttcaactttaaaactttctaaaattaattgctcaatttcagtattaacatagccgtgatagcctacttgttcaatattatgcgagatgttgaactgttcataatacgctttatttgcaacaacgatttttccatttcgatctatcattaaaatagcacttggaatattttcaatcgttgtttttaaacggttggattgaattttttgctcattattaagcttttgaaggcgtcgtgctaaatcattggtagacacaaaaagcgctttcgtttctacaacattactttcaggtacacgtatgtgataataaccatttgccaacaattgtgttgcataagtaacttcttgaatgggacggattaatgtacgcttaaaactacggcttgcaaaatacagacaaatgagtacaactaaacatgtcaatataagatatttccacaacgtccaatgcatttctgtaatatcgttattgtaacctttaatccatacatgataaccgttaaccttcttattaaaaataaaaacgtcccttttttgaatatagctatcactatttgggatagctttcagtttgccactactaaacacctttttatcatgtttagttatcaataaatctatattttgctgttttacaatttctttaactttatcaatctcattatcttggactaaataaatatatgatcttgcatctgttgctagagcttgttcgtgtttttctgataaaacatatgtgatggaagcgtgaataataatgcctaatgtaacaaaactgataattaatatactgcttatcaataacattaagcggtggtgaaacttcatcattgttctttaggtctttccaatttatagcctaagccacgcacagttttaataagttgtggcttcttaggattatcttctaatttatctcttaaatgactgatatgtacatcaacaattcttgagtctcctgcaaattcataattccataccgtatttaacatatgctctctcgtaatgactctgccttgtctttctatcaaataaagcaagagttcaaattctttcggtgttagctccaataactcattatgcttatatacttcaaaataatcgggtctaatacgtatcgatccgatggtaatatcatcgtcaatctcttctacttcttttacaaattgagaacgtcttaaaatggctttcacacgggcaacaacttctctaggtgaaaaaggcttagtcatatagtcatcggcacctaattctaaacctaatacccgatcaaactcatcatttttcgccgttaacattaatatagggactaaatttttatttgttcttacagtcttacatacgtcaatgccatcttttttaggtagcataacatctaaaataattaaatctggctgttcactttctaccttttctaaagcctcatcaccatcaaatgcgacaacaacttcataaccagctgtttctaagttatatttaagtaatgttacgattgaatgttcgtcatctactaccaacactttttgcgacatggtatgcctccctaacttataattatatttacattataaccgaactatttataaaaataacatcctacacattatctttacacattttttacattactttacatataaataaaatacttcttatatttccttctatcatttgcatgacttactctgggacaacgaaataaattttgtaaaaatatcatttctatcccactacctatgcatgagttttactcatttattcctaagcttatgtacaaattcgctttgtctaatgtgtaataaacactacataatcaatcattggtgactctttattatttctatcctgttgccaacttcaattcatttaaaaaggcgaacctagcaattaaagttgctagactcacctaattttattttgcttattttaaatttttaatcaattcatctgcaaatgctgatgtagaaacttcttcagcaccatccattaaacgggcaaagtcataagtaacaacttttgaagcaattgtatcttcaattgaatctgtaatcttatctgccgcttcttgccatcctaaatgttctaacattaatacagaacttaaaattactgaagatggattcactttatttaaacctgcatattttggagctgtaccatgtgttgcttcaaaaatagcatgacctgtttcataattaatgtttgcacctggcgcaataccaataccaccaacttgtgcagctaaagcatctgaaatatagtcaccattcaagttcatagttgctacaacatcatgctcagctggacgagttaaaatttgttgtaagaaaatgtcagcaatagaatctttaatgataatcttgccttctttttcagctttttcttgagcagcattagcagcatctctgccttcattttcaacaatttcgtcatattgttgccaagtgaatacttgatcaccaaattcagataatgctaaatcgtaaccccactgcttaaatgagccttctgtaaatttcataatattacctttatgaactaaagtaactgatttacggttattatcgatagcatattgtatagctgctctaactaatcgctcagttccttctttagaaactggtttaataccaatacctgaagtttctgggaatcgaatgtttgtcgcacccatttcgttttgtaagaagtcaattacctttttaacttctgttgtaccttctttaaattcaataccagcataaatgtcttcagtattttcacggaaaataaccatatcaacatcttgtggacgtttaacaggtgatggtactcctttaaaccaacgtaccggtcttaagcaagtaaataaatctaattcttggcgtaaagccacatttaatgatctaataccaccaccaattggtgttgttaaaggtcctttaacagcaattaaatattctttaattgtatcaagtgtttcttgaggtaaccattcaccagttgtatcaaatgctttttggccagctagcacttctttccattcaatgcgtttttcgccattataggctttctcaacagcagcatctataactcggcttgctgccttccaaatatccggtccaattccatcaccgataataaatgggataattggttcattaggtacgtttaatccttcagttccttgagtaattttttctgcagtcatagttattttacctccaaattttacatcttcatttttaatttgtattgattattttctttcttcaagcgggatatacttacgattcgtttcgccaatatatttcgctctaggacgcataattctattatctttatattgttctaaaatatgagcaatccatcctgcagaacgacttacagcaaagattggcgtgaataagtcatgaggtatttccatacagtgataaacactcgcactataaaaatcaacattaggaattaatcctttttcttctgccatacgtttttccattttcactgacatttcaaataattcttcacgaccagcgtctttcgtaatttgacggctcatttctcttaaatatttcgctctaggatcaccatctttatatacacgatgaccaaagcccattactttatctttattagcaaatttttcatctaagtaagcatcaacattttcaattgacccaatctcagataacatcgtcataacttgttcgtttgcaccaccatgtaatggccctttcagagaacctacagctgctacaatacctgagtacatatctgacaatgatgataccgcacaacgtgctgtaaatgcagatgcgttcaactcatgatcagcgtgtaaaataagtgctttattgaaggcttctacttctatatctgttggtaattccccacgtaacatatataggaagtttgccgcataacttaagtcaggattaggcttaagtggttctttatcttgtcttactcgagcaaacgctgtaactaatgatgctactttagcctgtatacgcattgctctttcataacgattttcatctgattcattttcagcatcaggatcgaaatgtgcaatatatgataatgacgtacgtaatgctgtcattggatgcacgtgatctgtaacatactcctcaaaatgtgtatacacacgaggatttaatgtcatgtattgatttaatttcccttttagatgagcaagctcttcttcgtttggcaatctatagttccataataggaaaataacttcttcaaattgcgcattttcagctagatcatcaatatcatagccggcataagtcaattgactttcaataattgaacttattttagtctccgctgcgataaccccttctaaacctctttgtaattctgccatgataaatttcccctttactgtttctttatgaaatggctttcaactaatattatagctaaacgcatttcgtttgtgaaatataaaaactggcattatatgtgcaacaatttttttgtaaatctatgtaaatgtcacagaatagccacaaatagcaccattaaagctttttcaagatgtgaataatccatgaattttacaatagaattaaattttcaattggttattatatatgattataaaaaccaaagtatattaacatggaattttacacatttttaccgaaaataattgtatatatctcaatataagtgcataataaacatatctatatttaagggagatgtattatggctgaaaaattacaaagggaactgagcaatcgccacatacaattaattgcaattggcggtgcaattggtacaggcttattcttaggtgctggtcaaacgattgcattaaccggcccttcaattctattaacatacatcattataggatttatgttatttatgtttatgcgaggtttaggagaaatcattatacagaatactgaatttaaatctttcgcagatgtaaccaatacatatattgggccttttgcaggatttgttaccggatggacatactggttctgttggattattacaggtatggctgaagtaacggctgtggcaaaatatgttagcttttggttcccagaaattccaaactggataagtgcactattttgtgtactgttattaatgtcattcaacctacttagcgcaagacttttcggagaattagaattttggttctctatcattaaaatagcgacaattattggtttaatagtagttggtttcgtcatgattctatttgcatttaaaactcaattcgggcatgccagtttcacaaatttatatgaacacggcatattcgctaaaggtgcttctggattctttatgtctttccaaatggcattattctcatttgtaggaattgaaatgattggtgttacagctggggaaacaaaagatccagttaaaacaattccaaaggcaattaacagtgtacccattagaattttaatattttacgttggtgcgttagcggttatcatgtctattatcccttggcagcaagttgatcctgataacagtccattcgtaaaattattcgcattgatcggaattccgtttgctgcgggcttgattaattttgtagtattaaccgctgctgcttcatcatgtaacagtggtatattctcaaatagccgtatgcttttcggtttatcaagtcaacaacaagcacctccgaacttttctaagacgaataaatatggcgttccacatgttgcaatctttgcttcatcagcattattacttgtggcagcattactaaactatattttcccagatgcgacaaaagtatttacgtatgtgactaccatctctacagtgttatttttagttgtatggggtctgattatcattgcatatatcaattatagtcgtaaaaacccagatctacataaaaatgctacgtacaaactattaggtggtaaatatatgggctacttaatatttgtattcttcatttttgtgttcgggttattatttattaatgttgatacaagacgtgcaatttattttattccgatttggtttatacttttagcatttatgtacttaagatataaacgtatcgctgctaaatcaaataaataacaacaagttttacccctgttgaatatactaaagttcaacaggggtttttatatgcaacttataatattaaattgcgtacttggctcaaaacttttactttctcatctatttaataatgtatcatttcagaaatacatccatacttctattttataataaatttccaaagtaatatgagtgaaagtttgaaggtgataatgtacatgtataaaagatataaacatttatatagattgccattcatacactatcattatcaaataacctattaattacgtcataaaataccagatgaaccaaaaaacgcctttccattgttgataaatggaaagacgtttttttataaattatagtacgtttgcatatccttcaaagattttaccttgagcagcatcaatcgtaactaacatgttattgcttatgtttttaacagctttttctacacctacaactgttggaatacctttttctaaaccaacaattgcacttggtgatgtaataccattttcttctgtaattaatcctaaagctttttctacataaggtacaaacgtttcatcgattgagttagtaacgataactttgtcagataaatctttaccttctaaatctttaacagtttcagcaactaacgtagtaccaacaactgatccacgtccaataccttgaccattagcaatttcgtcaccaactaggtggattttcatcatattagtagttccagtttcaccagttggtacaccagcagtaataatgattaaatcaccattagatactctaccagtttcaacagctgttgcaactgcattgtttaacaatgcatctgtactcttacgtccttttttaactacaggttgaactccccaaacaattgaacattgacgtgctgtttcttcacttggagtcaccgcaataatgtctgaatgtggacgatatttagagatagtacgtgccgttgaaccactttcagtagcagctacaattgctttaacatttaagtttaaagctgtatgtgcaaccgaaataccgatagcattcactaatgaagtttcaactaatttagtacgatctgacaataactttttataatcttgggctgcttcagctgatacagcaatatttctcattgttttaacagcttcttcaggatataaaccagcagcagtttcaccagataacattactgcatctgtaccatcatagattgcgttggcaacgtcactagcttctgcacgtgtagcacgtgggttacgttgcatagaatctaacatttgtgtagctgtaataactggtttacctaatttgttacattgtctgattaaatctttttgaaccattggtactttttcaggtggaatttcaacacccatgtcaccacgtgcaaccattaaaccatcagacacttcaagaatttccgcaatattatcaataccttcttggttttcaattttagggaatactgaaatgttagctttttgttcttctaaaatttcacgaatttctaaaacatcactaggacgacgtacgaaacttgctgcaatgaagtcaacattttctttaataccgaaacggatatcttcagcatctttttctgtaataccaggtaaacttactcttacaccaggtaagttaacaccttttttgtttttaagctcaccagagtttaaaatatcacatttaacttcttttttagcatggtcaatatctttaacttgtaattcaattaagccatcatcaagtaaaatgtatgaacctacttgaacatcgttaattaagttttcatatgttactgagaacttttcaggtgttccttcaacttcattcatgctaacaataacttcgttaccacgttcaagttcaatgataccgtctttcatattatgcgtacgaatttctggacctttcgtatctaataaaattgctacaattttgtctaatcttttagctactttacgaattgtatcaattctacctttatgctcttcatgactaccatgtgaaaagtttaatcgtgcaacgttcataccagcattgattaatttctcaatcatttcttctgattctgaagctggtccaattgtacatacaattttagtttttctcattttataattcctcctgaaatcttatatagataacttgttagcaagttcatatagactataatcaaatttatgatctttaccatcaaaaatttcatcaaaagatgttgctacaattttattgttcttaattccaacacccttagctgtttcaccttgcattaataagtctaccgcatatccacctaaacgtgatgctaaaactctatccgcacctgttgggctaccaccacgttgaacgtgacctaacacagacactctattatcaacattgatgtattgtgataattctttttgacaatcttgcgcagtcatgcaaccttctgctacaagaacgattgagtgtttcttaccacgtttaataccttgttcaattttatcagctatttctttaatatctgttttcacttctggaactacaattgtctcagcaccaactgataatccagcccataatgctagatctccacaatcacggcccattgcttcaatgataaatgttcgtgcgtgacttgacgcagtatctctaattttgtcgactaagccaataatcgtatttaaagctgtgtcaaatccaattgtaaaatcagtaccattgatatcattgtcaatcgtaccaggaataccgatagtttgaatttctttgcattcctcactgatgcgttgtgcaccgcgataactaccgtcaccaccaataactacaaggccctcaatccctcttttacgtaagttttcgattgcaactttacgtacttcttgctccttaaactctggacatcttgctgaatacaagaatgtacctccacgctgaatcgtatccccaactgatcctaattcaagtttatgaatatcatcatttaacaatccttggtaaccatgatacacaccataaacttcaatttcattgtaaattgctgtacgaacaactgctcttacggcagcattcattccaggtgaatctccaccactagttaaaactgcaattttcttcatgacgacatacctttctataactgatttatctttaactctaaattaccacaaattgatatgtcattccatcaaaactaatgtattgaattgatgtaaacgttttaaatattgaattttattttaacttaattaaaaaaagattagtagccacaattttgactactaatcttagttaaaattcagtatctaaatattaaattattgttttaatgtacttcaatttatggtaaaacccagtatcgatttaacataaaaatgctcaagttgattattctatataagaaccgatatttctgaatttttcaaagcgatcattagcaatttcatcacgtgataatgactcaagtgaatctaactgtgcaacaaacgctgatttaatagctaaagcttgctgttcaacatctttatgtgcaccgccaagtggttcagaaatgacatcatctataatacctaattgcttaatatcatgggcagtaattttcattgtttcagctgcaattttagccaaattactgtctttccataataatgccgctgcaccttcaggagatataacagagtaagtactattctctaacatcaatactttattggcaataccaatacctagagcacctccactgccaccttcaccaatgactatcgcaataactggtacttttaatgaagccatctcaatcaaatttgttgcgatagattcactttgtccacgttcttcagcagctttaccaggatatgcaccttttgtatctataaatgtaaagataggacgattgaatttttcagcttgtttcattaaacgtaatgcttttcgataaccttctggatgcgccataccaaaatttcgataaatattatcttttgtatcttttccacgttgttgtccaataactgtaacagcacgaccatttaaaaagccaataccaccaatcattgctggatcatctctaaaattacgatcaccatgtagttccataaacgaatcaaagatatatggaatataatctagggtcgtaggtctttcttgcaaacgcgcaatttgcacacgatcccatggttttagatttgtatatatttttttagtttctcgttccaatgacgcttcaagcatgtcaatttcttcttgtaaatccacatcatttttatcttgagattcttttaaagattcaattttatttcgaatttcaaaaagtggtttttcaaaatctaacattatttagtcacctcttgatggatttttagaatttcagacaatgtttgacgcatatcattacgatgtacaactttatccaattgtccatgctctaataaaaattctgcagtttggaaatcatctggcaatttttcgtttattgtctgttcaataactcgacgacctgcaaaacctatcaacgcttttggctcacttaaatttatatcaccaactgatgcaaaacttgcagatacaccaccagtagttggatgtgttaaatatgatatatataatagtccagcgtcagaatgacgttttaaagatacactggttttacccatttgcatcaaggaaataataccttcttgcatacgtgcaccaccacttgcagagaaaagaataaatggtaaacggttctcagtgcagtaatcaatgatgcgacatatcttttcaccgataaccgatcccatacttcccattctaaaacgtgaatccatgacagcaacgccaaatttcataccatctagttgcgctgtaccagtcacaactgcttctttaagacctgtcttttgttggtccttttcaattttttctaaataacttggaaaatctaatggattcgcagaggtcattcccttatcgaattctgtaaatgatccttcatcagaaattgcttctatacgtttatacgcagttaaagcaatatgatgatcacaattaaagcacacatttaaattttcagctaattcttttgtgtacataattttcttacactttggacacttagtcataatacctgcaggcacatcattatttttagagtcttgtactgtaagatatttctttttctttgttcgattaaaaaaatctttaaacataggaaaacctccaaataacctctgttctaaccatttagagccttaaactgaacttgaccagttaaaaacgggtttaaatttatttgatttatattcgtttgactgttgaatgtttatcataaactttcattttcatcattttaatgactctttattgctaacttttaagcaatttaattaaacgttaattatttttattgtaaatctgtaagtttcattgttttatcatacacatcttgcggatcaacttcaatcctagctactccagattccattgccgctttagcaacattacgagcaactgatggcgctacacgtttatcaaacggtcctgggatacagtagtcttcatttaattcagaactatcgattaaatcagcaatcgcttctacagctgcctttttcatttcttcatttatatgtgtagcttcaacctctaatgcacctctaaaaataccagggaaagctaatacattattaatttggttaggatagtctgaacgtcctgtaccaacaactcgtgcacctgccgctttggcatcatcaggtattatttcaggatttggattagccattgcaaatataattggattatctgccatactcttaaccatatcttgtgacagcgcattagctacagaaactccgataaatacatctgcgtcttttacgacttcttctaaagacccttcaatcttatctttatttgtccatttagctacaacatctttcgtaggattcataccatatgaacgtccttcaaaaattgcgcctcttgagtcacacataaccatatttcttacaccatacgcgtatagtaatttaacaatggctattcctgctgcaccagcaccatttagtacaacttttattttagcaatatctttgttaacaactctcaatgcatttaccaaacctgccattgttacaattgctgtaccatgttgatcgtcatggaataccggaatattagtttcttttttcaatcgttcttcaatttcaaaacaacgtggtgccgaaatatcctctaaattaataccaccataattaggttctaacaacttaactgttttaatgatttcttcggtatcagttgtatttaacgcaataggcaccccattgataccagcgaagcttttgaataatactgctttaccttccattacaggaatacttgcttcaggtccaatgttacctaaacctaataccgctgttccatcagtaataactgcaactgtatttcctttaattgtgtaatcatatacttttcttttatcttcataaatatctttacacggttcagcaacgccaggtgagtatgctaaacttaattcctctttattagtaacttttacatttggtttaacttctaatttaccttgattacgtttgtgcatttccaatgcttcatctcttaatgacatgaaatcagcccctaattcaatatttatttttaaaaaataacttggataaaacgcattacattataaaagtaaaaatattgggtaaatctgaatgagtaagaatttatggttttgattatgtaacacaaatagcgataaacgataataaaataatatttataaagatacattaaaccatactatctaaagatatacctttaattattataatggatagcaaaaaccaatatatcaaaaagttattatttttccgcacgatatatcgacaaaattctttactcaatttatgtatactgctttttgtgctaattattcttatggattaatcaataatgtaaagtgaaactcataaaaataataagcataaaaaactaatataaacgcaaactgatggttaaaaaatatctaaccatcagtttactatatcataatttattagttgataaaagttatataagcctaatatcactagggttaaaggattgtataaaattattaaacatactatctttttgattaatatagcctaaagtagtcatttgtttaatcgtttcatcataaaaggataacacaacatcattagcattctctttcgtagctttaatcatctcttcaaacatatctatttgtgatttatttctaattataatttgtttggcaaatgctaatttttgttcttcaaaagtggctaatgtctgaatctcatttataattagttgacgttgttgctttctatggtcaaatttcccgctaactataaacaagtcattatgtgataacaactcatcgtactttttaaactgattagggaaaatcacaccatctaaagtttcaatgccatcatttaatgtgacgaatgccatattttgaccatttttagttcgaatttgtttaactttatcaaactgtactaatataggtttataattctgcgcgttactcaatttaaatatcgttaaatattgtttggcaacaaactttttatctactgggtgttgcgaaacataaaatcctaaatattctttttcgtactgactaataagtgcatcaggcaattcttctttatcttcatacatctgttttggcgttaaaatatcaaataaaaaaccatcttgttcaatgtttaaatcgccatccaacacttgatcaatagcttgcaacaacgttgaacgtgttttaccaaaagcatcaaacgctcccactaaaatcagtgcttcaagtaactttctcgttttgactctcttcggtatacgtctagcaaaatcaaagaaatctttaaatttgccgttctgataacgttcatcaacaatcactttcacactttgataaccaacacctttaattgtaccaattgataaataaatgccttcttgggaaggtttataaaaccaatgactttcgttaatgttcggtggcaatatagtgataccttgtttttttgcttcttctatcatttgagcagttttcttctcacttccaataacattacttaaaatatttgcgtaaaaataatttggataatggacttttaaaaagctcataatgtatgcaattttagaatagctgacagcatgtgctctaggaaaaccataatcagcaaatttcagaatcaaatcaaatatttgcttactaatgtcttcgtgataaccattttgctttgcaccttctataaaatgttgacgctcactttcaagaacagctctattttttttactcattgctcttcttaaaatatccgcttcaccataactgaagtttgcaaatgtgctcgctatttgcataatttgctcttgataaataataacaccgtaagtattttttaatataggttctaaatgtggatgtaaatattgaactttgcttggatcatgtcttcttgtaatgtaagttggaatttcttccattggacctggtctatacaaagaagttacagcaacaatatcttcaaagtgttccggctttaatttttttaatacacttcttacaccgtctgactctaattggaatatgccagtcgtatctccttgcgacaacaattcaaacactttttgatcatcgaacggaatcttttcgatatcaatattaatacctaaatcttttttgacttgtattaagatttgatgaataatcgataagtttctcaaccctagaaaatctatttttaataacccaattcgttcggcttcagtcattgtccattgcgttaataatcctgtatcccctttcgttaaaggggcatattcatataatggatggtcattaataataattcctgccgcatgtgtagatgtatgtcttggtaaaccttctaactttttacaaatactgaaccagcgttcatgtcgatggtttcgatgtacaaattttttaaaatcgtcaatttgatatgcttcatcaagtgtaattcctaatttatgtgggattaaacttgaaatttcatttaatgtaacttcatcaaaccccataattcgtccaacatccctagcaaccgctcttgcaagcagatgaccgaaagtcacaattccagatacatgtagctcgccatatttttcttggacgtactgaataaccctttctcggcgtgtatcttcaaagtcaatatctatatcaggcattgttacacgttctgggtttaaaaaacgttcaaataatagattgaatttaataggatcaatcgttgtaatacctagtaaataactgaccagtgagccagctgaagaaccacgacctggacctaccatcacatcattcgttttcgcataatggattaaatcacttactattaagaaataatcttcaaaacccatattagtaataactttatactcatatttcaatcgctctaaatagacgtcataattaagttctaattttttcaattgtgtaactaagacacgccacaaatattttttagctgattcatcgttaggtgtctgatattgaggaagtagagattgatgatattttaattctgcattacacttttgagctataacatcaacctgcgttaaatattcttggttaatatctaattgtttaatttccttttcagttaaaaaatgtgcaccaaaatcttcttgatcatgaattaagtctaattttgcattgtctctaatagctgctaatgcagaaatcgtatcggcatcttgacgtgtttggtaacaaacattttgaatccatacgtgctttataccctgaactaaaacactttgatgatctaaatacgtatcttcatgcgaatcaaaaacttgaacaatgtcacgatgttcgtctgcaacatttttaaaaatgataatcaaattcgatgaaaattgttgcaatagttcaaatgaaacattttccattgaattcatttttatttccgatgatagttgatacaaatcttttaatccatcattatttttagctagaacaactgtttcgactgtatttaatccatttgtcacatatattgtcataccaaaaatcggtttaatgttatttgctatacatgcatcataaaatttaggaaaaccatacaatacattggtgtcagttatggcaagtgcatcaacattttcagacacagcaagtcttacggcatcttctatttttaagcttgaatttaacaaatcataagccgtatgaatatttaaatatgccaccatgattgaatggctcctttctattagttaagttttgtgcgtaaagctgtagcaagttgctcaaattcatcccagctgttcactgaaactcctgacgcattcggatggccaccgccaccaaaatcttgcgcaatatcattaataatcaattgccctttagagcgtaagcgacatcttatttcactaccctcatcaactgcaaacacccatattttcaaacctttgatgtcagcaattgtattaacaaactgagatgcttcatttggctgaataccgaattgctccaatacatcttcagttattttaacttggcagaatccatcatccataagttcgaaatgttgtaaaacataaccttgaaacggcaacatttttgggtccttctccatcattttatttaatagcgcattatgatcaatatcatgcccaattaactttccagcaatttccatagtatgttctgaggtattgttaaaaaggaatcgcccagtatcaccgacgataccaaggtataaaacactcgcgatatctttattaacaattgcttcatcattaaaatgtgagattaaatcataaatgatttcacttgtagatgacgcgttcgtattaactaaattaatatcaccatactgatcaactgcaggatgatgatctattttaataagtttactacctgtactatatcgttcatcgtcaattcgtggagcattggcagtatcacatacaattacaagcgcatcttgatatgttttatcatcaatgttatccaactctccaataaaacttaatgatgattccgcttcacccactgcaaatacttgcttttgcggaaatttctgctgaatatagtattttaaaccaagttgtgaaccatatgcatctggatctggtctaacatgtctgtgtataataattgtatcgttgtcttcgatacatttcataatttcattcaaagtactaatcattttcatactcccttttttagaaaagttgcttaatttaagcattagtctatatcaaaatatctaaattataaaaattgttactgccatattaaactatttgcccgttttaattatttagatatatatatttccatactatttagttcaggggccccaacacagtgaaattggacccccaatttctacagacgatgcaagttggggtggggccccaacacaaagaatttcgaaaagaaattctacaaacaatgtaagttgggctccaacgtttgtgcgaaatctatcttatgcctattttctctgctaagttcctatacttcgtcaaacatttggcatatcacgagagcgctcgctactttgtcgttttgactatgcatgttcacttctattttggcgaagtttcttccgacgtctagtatgccaaagcgcactgttatatgtgattcaataggtactgttttaatatacacgatatttaagttctctatcatgacattaccttttttaaatttacgcatttcatattgtattgtttcttctataatacttacaaatgccgctttacttactgttccgtaatgattgattaaaagtggtgaaacttctactgtaattccatcttgattcattgttatatatttggcgatttgatcgttaattgtttcacccatctgaggctgtcttcctaaaagttgcatagactttaaaacatcttgtctattaatcacacccactgtctttttattactcgaaacgacaggaatcaattcaataccttcccaaatcatcatatgcgcacaacttgctactgtactcatagcatttacataaatagggtttcgcgtcatcactttatctatttcgtcgtcgtcctttgtattaatcatctctcgacttgttacaatacctactaatttatacgactcattgactaccggaaatcttgtatggccagttcgattcgccatacgcttataatctgctattttcatcgtatcaaacagcacagacaaatcatctaatggcgtcattatatcttgaactattaagatatcttttcgtattttctgattaaaaagtgctttgttgataatatttgcaactaggaatgtatcataacttgatgatagaacaggtaaatcatgttcattcgcaaaattaataactttattagatggcttaaatccaccagtaattaatatagccgtacctctttttaaagcttcaatctgcacatcttcgcgatttccgacaatcaataatgtctttggaccaatatattttaaaatatctttgagttccattgctccaattgcaaatttagataccatcttagtgatacctttattgccacctaacacttggccatcaataatattgacaatttcattaaaagttaaatgttcaatttcattacgattacgtttttcgattcgaaccgtaccaacacgatctatcgttgcgaccatgcccattttatcagcatctttaattgcacgatatgctgtcccttcagatacgtttaaaaatttagcgattttacgcaccgaaattttagagcctatagataacgattcaatataatctaaaatttgttcatgttttgtcattctttacctcttcttttcgaacagtattaactacattataactttattttggataaaaagcattgaagtgaaatgaaataatgatcgtttcacctattttattttttgaaaatatacaacaaacacaaagatcacaaaatctttaattttaaatggaaaaatccattattatttattagaatgtaagtgaggagggatgtactaatgtataaaaatatattacttggtgtagacactcagttaaaaaatgaaaaagcactaaaagaagtgtctaaattagctggcgaaggtacagtcgtaacagttttaaacgcaatcagcgaacaagatgctcaagcatcaattaaagcaggtgttcatttaaacaaacttactgaagaacgaagcaagcgattggaaaaaacacgcaaagctttagaagattatggtattgattatgaccaaataattgttcgtggtaatgcaaaagaagaactattaaaacatgctaatagcggtaaatacgaaattgttgttttaagtaaccgtaaagcagaagacaaaaagaaatttgtacttggaagtgtcagccacaaagtagcaaaacgtgcgactatccctgtattaatcgttaaataaaatttttatccagaatcacaaataatctttcaatcatgatgcagtctcaaacgactgagtaaacacaagaaatgattatgactgtggttctggattttttatatcgtagtaaatttataatcaatgtctaattgtataaaactaaaattacgagagtaggtcagaaatgataaagaaccactgatgtcccccgtccacgtcgtaactgaatcagtagaatataaaaacacccactaaaaatatgcagacgataacttccacatagattagcgaggtgttttttagtgtaaaatctatattctatttaaaactgaacagattcacctggttttaaaatttgcacgtcccctacattaacagcatctttaaattgttgtggatcttgttcgattaatgggaatgtatcataatgaatcggtacagaaatttttggtttaataaattcattaatagcataacttgcatcatcaatacccatcgtaaaattatctccaattggtacaaaacatacatcaactggatgacgtttcgcaataagtgacatgtcactaaacagacctgtatcaccagtatgataaattgtttttccttcaacttcaaacacgatacccattggcatacctaaataaactggaataccattttcatgtgtaaaacttgaactatgaaatgcttgaacaaatttaacgcttccgaaatcaaagtttgctttaccaccaatattcataccatgaacattttcaacaccgtgatatgaagaaagatagtcagccatttctgcacttccaattactgttgctcctgttttctttgctagttccacaacatcaccaaaatgatcaaaatgaccgtgcgttaaaacgatatagtctacctgcactgtttcaatattcaaatcacacttagggttatttgaaataaacggatctacgataacctttttgttgttcccttctaaataaatcgttgattgaccatgaaatgataacttcatttgagcatcctcctatcaattgctatataaatttagtacccttttgccacttaattataacaaattctcaaattttaaaaattgaaaatctagttaatgtattagctcgattttgaaatctaataataattggcataaaatggaagtaatattatgttgaggagtgtttatgaaatgacaaaaatatcaaaaataatagacgaactgaacaatcaacaagctgatgcagcatggattacaacaccgttgaatgtatattattttactggataccgtagcgaaccccatgaaagattatttgcattattgattaagaaagatggtaaacaagtactattttgtccaaaaatggaagtcgaagaagtcaaagcatcacctttcacaggtgaaatcgttggatatttagacactgaaaatcctttttcactttatcctcaaacaatcaataaattactaattgaaagcgagcacttaacagtagcacgccaaaaacaattaatctctggtttcaatgtcaattcattcggagatgttgatttaacaatcaaacaattaagaaatattaaatccgaagatgaaattagcaaaatacgtaaagctgctgagttagcagataagtgtatcgaaataggtgtttcttatttaaaagaaggtgtgactgaacgtgaagtagtcaaccatattgagcaaactatcaaacaatatggcgtcaatgaaatgagttttgatacgatggttttatttggagatcatgccgcatcacctcatggcacaccaggagatcgcagattaaaaagcaatgaatatgtactatttgatttaggtgtaatttatgagcattattgtagcgatatgacacgtaccattaaatttggtgaacctagcaaagaagcacaagaaatttataatattgtattagaagcagaaacatctgcaatccaagcaattaaacctggaatacctttaaaagatatcgatcatatcgctagaaatattatttcagaaaaaggttatggtgaatatttccctcatcgcttaggtcatggtttaggattacaagaacatgaatatcaagatgtttcaagtactaattctaatttgttagaagctggcatggttattacaatcgaaccaggtatttatgtaccaggtgttgcaggtgtaagaattgaagatgacatacttgtcactaatgaaggatatgaagtattaacacattacgaaaaataaggagtgggataaaaatgaaaagcttgttacaagcacattctcattcagtcaaacactgccaatataacattgtagcgcctaagacataaatttttatccaagtctaaatgcaatatgtaacaaacaagctagaaacacatatgcaggtatgttcatcagtaacatgtaatgaatcaaatcaatatcattcatgttcgatgatttcttcgcattgtttctagctttaatttatcattatttaattttaataaccaaggagatgataacgtcattctttagtacgctgtaatccattcccttttcatcaaattcaaattataattgtaatgcttcttctacagatttatattccatttcaaatgcctctgcaacgcctttattggttacgtgacctttgtaagtatttaaacctaatgataatggttgatttgatttaaatgcttctctataccctttattagctagcatgagcgcataaggtagcgtagcattatttaaagctaacgtcgaagtacgcggtactgcacctggcatatttgcaactgcataatgaaccacaccatgcttaatatatgtaggatcatcatgtgtcgtaattttatcagttgtttcaaaaataccgccttgatcaatagcaatgtcaataataactgacccatttttcatttgtttaatcatgtcttctgttacaagtcttggcgctttagcacctggaattaaaactgcacctattactaaatcactttgtttaacatacaactcaatattcaacggatttgacataattgtatgtacacgtccaccgaataaatcatctaattgttgtaaacgctttggattaacatctaaaatcgtaacatctgcacctagtcctagtgcaattttagctgcatttgttcctgcttgaccaccaccgataatagttactttacccttaggtactcctgggacaccacctagtagaattcccataccaccattaagtttttgtaggaactctgcgccaacttgagctgacattcttcctgctacctcactcattggtgataacaatggtaaagatcggtctggtaactgcacagtctcatatgcaatactaattacttttctatctatcaaagcttgtgttaatttttcttcatttgctaaatgaagataagtgaataatacaagcccttctttaaaatatggatattcagattcaagtggttctttaactttaataaccatatccacatcccaaacttttgcttgttcagcaacaatctcagcacctgcttctttgtaatctacatcttcaaagaacgatcctgaacccgcatttgtttccactaaaacagtatgcccactttctactaaagcgtgcacaccactcggtgataaaccaacacgattttcattatttttaatctcccttggtataccaattttcataccatccacctccataatcatcttaacgcgaacattttgaaagcgcaatcaaaaatccacaaaattgtaaaggttattacactgacttttccgaaaattgtggtaaaatataattaagaaagaacaaggaggcacttactatgattacttacaaaaatattttaatcgcagttgacggttcacatgaagcggaatgggcatttaacagagcagttggtgttgctaaacgtaacgatgcgaagttaacaattgtgaatgtaattgattcaagaacgtattcttcttatgaagtttatgatgctcaatttactgaaaaatctaagcattttgcagaagaattattaaatggttataaagaagtagctactaacgctggtgttaaagatgtagaaacgcgtctagagtttggctctcctaaatctatcattcctaaaaagcttgcacatgaaattaatgcagacttgattatgagtggtacatcaggcttaaatgccgtggaaagatttattgttggttctgtatcagaatctatcgttcgtcatgcgccatgtgacgtgttagttgttcgtactgaagagttaccagcagacttccaaccacaagttgcaacaactcaattacgtgaaaaatatcaaaattaaatatagatgatcattagataactacttgatcattatgaaccaagtgcaactttctgcacttggttttttattgtttataaataaaactcacttaataatgttttcataatcttcttcgactacttaattctttaagatattcgtgaaaagagacattacactagttaattttcaaacaatacaaaaagcgtctacctcctacatataattgtagcggagatagacgcttaatatttatttaaaaattattttaaaccaccgaatgtcataacatcacgggcaatcatactttcttcatctgttggaataacgacaactttaactggtgaatgaggatagttaataaatccttctttaccacgtagtaagttttcatttttcttaggatcccagtaaacacccataaattctaagccttcaagaactttcgcacgaatttctactgagttttcaccgatacctgctgtaaatacgataacatcaacaccatgcattctcgcagcatatgatccaatatatttgtgaattttagaagcaaatacatctaaagccatttgtgaacgtgctttacctgattcagcttcttctgataagtcacgtaaatcactagatgtacctgataatcctaataaacctgattctttgtttaagatttccaatacttgttcagcagttttacctgttttttccataataaatggaattaaagcagggtcaatattaccagaacgagtacccattgttacaccagcaagtggtgtgaagcccattgatgtatcaatagatttaccgccatcgatagctgcaattgatgctccattaccaatgtgacatgaaataatacgtaaatcttcaattggcttatctaacatttctgccgctctttgtgatacaaatttatggcttgtaccatggaaaccatacttacgaatgccataatctttataataatgatatggcaagctatatagatatgctttttcaggcattgtttgatggaatgctgtatcaaaaattgccacatgagggatatttggtaataacttacggaaagcacgaatacccatcaagttagctgggttgtgaagcggtgctaattcgcttaattcttcaatttccttttcaacctcatcagtaatagctactgattcagggaatttttcaccaccatgtacaacacggtgacctgttccatcgatatcgttaatatcattaataatattatgcgctttaaaagcatccaacatgatatcaactgcctcaacgtgatccttgatatcttgtactgttttaactttttccccgttgacttcaattgtaaaaattgaatccttcaatccgattctttctattaaaccttttgttactaattcctcttcaggcattctaattaattgaaattttaatgatgaactaccagcattgatagccaagattaattttgacataagtaatgatcctccatcgtttgctttttatactatttcatttctcattttatcattcatacagttttatgactatactattacagattattttttaggacgatttgtgtccatccactgatttaactctgtcataaatccttgaaattgtgaaggatttttgaaatcaggaatatttgccaataatacttcaactggctttgtttcacccgattttttcttttgtaaaattaatatagattttcgcgctttttcatttttaaataaagttggtggtaaatttaaaaatgcttgcatctctgtctctgttgcaatatatttttcaagctgttttacatgttcacctgtaaaaatattacttggtaccactagaaaggcatatccagcatcttttaatgcatttattgcttgttctattaataaataatgtgaataactatgtccttcttcaaaacctagcttaaactccttacttctttcatcaattggataatagcctactggaaaatcaccaataacgatatctgcttcttctaatggtagtggcatgatggcatcttgaggatacacatcgaaaggaatttctaagaagtttgctaaatgtacactaacacgtgataaaactggatcaacttcaattaaatgatgcataaccgcaatttcaggtaacacttcttttacagtagcacttaaatgaccggcaccacttgcaatatcaacaatatgtaattcttcttggttgttcataaaacgctcaactaaaaatcctagtatcaatccaattgaatctggtgtaatttgatgatttgcttgtatcttttcttcctgcattaaacttaaatatgcaaattggaatgctttacgtcgatcttgtaacgtcgattgttctaacaatcctctttcattggtatatacttgttccattgctagcccaagattttcaataaaactttggccattttcattatttaatgttttagctttttcatctaatgtatgaaacaagcgttccataattgtttgttgttctgccatattcgtccctctccaataaaaagtgcccataggtcttagcaatcatagaaaacaattctattttaatgctgttgacaacgatggacacgatgtatacattttaagatttatctctttaatgattaaatatttttgtatgcagctaaagcagcatcaaaatctgggaaatcagtaccttcactaacgatttctttataaacaactttattatctacatctaatacaaatactgcacgagctaataagcgaagttcttccataacaacgccatagttttcaccaaatgataagtcacggtggtcacttaatgtaatgacattgtctaaacctgctgaagcgcaccatcttttttgtgcgaatggtaagtctgctgaaattgtaagcacaatcccctcttctttagaagcttcagagttgaatttgcgagtctgctgatcacaaacacctgtatcaattgatggtaccacactaattaatttctttttaccagcataatctgctaatgttacttgatttaagtcattatctaacactgtaaaatcaggtgcaaaatcaccttcattaatttgttgaccttttaagtggattggtccacctttgaatgttatttcagtcatatacttgacctcctgcattttaaaattctaactacatcatacgacaatttatggtttgattacaattttcatgctttaatcaaaagcaaatttaattttatacaaattgttgaatataatcaaaagcattttttaaaattaaaatagcagtaataataataaataatacttttacatagccaacaccttgtttgatagcaaaatgtgctccagtatatgacccagcaatcatacttatagccataattaaacctattacataatctacttgtcctaataccataaataatacaagcgcacctatattagaagcaaagttcaaaactttagcatttcctgctgcacttaaaaaatcaaaaccaaagactaacaatacaaaaagcataaatgaacctgttcccccacctacaaatccatcataaaagccgattaatataaaaagtgctgcaaatattatggctttcttaaatgtaaattgagtaaacgtgcgtgtattgccccaatcttttttaagtaatgtgaatataaacaccgacgaaagtgcaataatgattagaggtttcaatatttgtgacggaaccatcgttgcaatatatgcgccacatgcagatgccaaaaatacaaaaccaaataatttggcaacaacaaataagtccactttaccggaccttataaactttatcatactagttaaagaaccaaatgaacttgccaatttatttgtacctaaagccacagatggtggtagaccgattgctaataatgctggcgtagaaattaaaccgccaccccctacaaccgaatctataaacgccgcgataaaaccaaataaaattatgattataatcatcgttaagttcaaatccatagtttaacatccccttatgtttaaatttactctaggattttatttataaaaagtcatttattaattggtttgtttgctgttctttaatagttttataatcactagttatttcaagtgtttcaatattttcaacagcacgattaatcatctcttcaaaatcaaagacactttcatattggactaccttttcaaagtttggttcggttactggatttttaggggtgaaaattgtacaacaatcttcaaatggttgaatagatgtttcaaatgtaccaatttctttcgatttaataataatttcttctttatcgtaagttaataaaggacgtaatacaggagtagaagttacattattaattgcatacatgctatgaagtgtttgactggctacctgccctaggttttcaccatttacaatagctaaagcccctatttgatgtactaatttatcagcaacacgcatcatcatacgtctcgttgaagtcattgtatatcttggatgtacaactttatttacccgtttttgcaattctgtaaatggtacaatatgcaatttaattggtccaacacgttcagctaaaatacgtgtcaattcaataactttttcttttgcttgatcacttgtaaatggtggactatggaaatgaatcgcttcaattgttacgccacgtctcatcacttccattccagcaactggtgagtctataccgcctgaaagcattagtaacgtcttaccaccagtaccaactggtaatccgcctgaacccggaacaacttcttcatacatataaattgcatctaatctaacttccactcgaatttcatgatctggacgtttgacattaacagaaacattttcaatttgtttcaatacggtaccacccaattcacgttgtaattcatacgtatccattgggaaatttttatcggcacgcttcacatcaattttaaatgtgctgttttcttcaaattgctgcgcaaatttaattgccgctgcactcattgcctctattgttttttctacttttaatactggactaatagatttaataccgaaaatttttgataatcgatatgttatttcatttatatctgcatggtcttcaagttcaatatacatacgatctcgtttgcctttaacgacaaacccatcaagtccttttaatgacttatttacattatttcttaattgatttacaaatttttttctatttgaaccctttaatgttaactccccgtatctaacaagcaagtgatcatacttcattattttagcaactccttaatttcctcataaatgatgataaatatttctttaaaccttgctatatcttctttagttgtagtagccccaaatgataatcttatactaccttcaatagatttgtctgataatcccattgcagccaatacttcatttaatttattacgtttagatgaacaagcactcgtcgtagatatcataatgtcatattttgaaaaagcattaactaatacttcaccttttacgccaggaaaactaatatttaaaacgaatggtgaacctgaagttgaagaattaatataaactccatgatatttatttaaaaattgacggacgtcattatttaactcagtaacaaatgcattcaatgcttcaaagttttcattagctatcttcatcgctttaaccattgcaatatcatttggcaaattaactgttccacttctaacgccatattcttgaccaccaccatggacagttggttcaacattttgaatgtgatttacaagtaagacgccttgtccttttaaaccattaaacttgtgtccacttaaactaatactatctatgttattgagatccattgaaattttgccgaatgcttgaaccgcatctacatgaaaatgtgccttaggataattttttataactttagccatttgtggaataggctgtatttgtccagttacattatttacatacatacatgttactaaaccgactttgtctgacactaattctttgaagtgttctaagttaatactgccatctttctttacatcaacatatttaactttaaatccttcgtgtgcttccaaatatcttacaacctctaatacggacggatgctctaacacggatgtaattatttccttcgctgtatcaaatttacgataggcaataccttttaaagcaagattattggattcagttgcaccactagtgaatacaacatcataatttgtttttgaattaatcattgcattaatttgggcttttgcttgttgtagtaattgatttgcctgcaaaccagctttatgcggactattcggattataatacattgattgatttacttttaaataagtatctaacacttcttcaaatgctttcgtcgttgccgcattatctagatatatcaaaataaacacttctctttcattaatcatcaatcgttaaaattgttttactcaagcattatactattatccgacaaaaaataaaggttatagcgcaaaataatcttatttctacttattaaataagaattagactatttcactctatttaaacagctgtgtgattatgcttttttcactacttatattaattaaaacaacacatttgattacgtttatctttaaacaattgctatttatatttattgtccctttcatttatccatataaaaaaagaagctagacaacgtatcgttggctaacttcaattattaaactcatcagtccaatttgacagagtgctcatattatttaagtataactacatactagtttctattgcttaataacttcttcttcaatatgtttagtgacacctggctcaacactttcaagagcttgctctgcaatttcaatcgcacgcttatagcgattatttttaaataatcgttcagcttcatttaagctcttatcaacattgctatagtccttacgatatctatttccatattgaattaatttctctgcataaacagcattaacaagaacatcatttgcttcatcttcaaatgtattcatttgaatcacaattttagacactttatcttttaactgtttaacgtgtattggacgttcactaaattgttcgttaacatcacgaacttcatgatcaatttcatttttcatgatgataaacctttcaggaacgcttgttaagttagaagcaagtaatcgacgatacacttcttctttcttcgattgtactcgtagcagattgtcttctgcttctgcttcatcttcacgcaattgaatcagatgattttgtagcttttcttgtttgtcattaataactgtgacatgatcttctaaatattgtaaattatcctgaacctcgctatatcgtacagcagatttagacatttcttttaaaatatcatcatatacagaaattaaactttgaatttcattttcaaattgacgaacactttgagcatcagattcatttatatagtagttttcacgtacatattcaatttctgtttgcaatgtataattcatgtctttagctttgaataagttatccgtaatgatatcttttgtttcttcgacatcatttttagctttaacttcatgttcaattaaatcatacatgtcatctaacttatcattgatattagctagtttatcattagcttcttctaattctaagcggctaattaatggttcaacgaaactaagctctgtttttaagctttgtaatgtactgtctacttttacgtgatccagatcatacccttcaactttaagatcacggcaaccatattttaaatcttggaattgaccaggtaattctttttgagtttctctaattaattctggtatttcttccatataagatcttagctgtttcatttgttcattcaaggcagctatatggttgtgcgcttgtacataattaccatcagcttttagtacttcatattgctctaaccttggctcaaacttttcaatttcagtttcaagtagacttgctgcctcaccaaattgatgacgatttgctaaaacatcacgtttcatttcacgataatcaaccttacatttgtcatataattcatcattatctttgtataacgcaataatttcatttacatcttctaattgttgctgatagctttgttcgtaactatccatcaactcatttgcatcatcaatttcactttgagatgcgttgaaactaaatttatctaataaagcctcagcattatggattttttcttccacaggagctagatacttatttgtactttctacgttgtcctttttcattgcatcgtatttcgtttttgtttcaccttttaaattcaacttagataattgtgcaaggttttgatcaaaaggtaacgtctcaatttcatttttacgttcgattgctttttcaataatttgtcgtttatttgaacgtaaatagaataatacacctacagcaatcaatataatcacaattattgccaaaatgatatataacaccatatgcttctcctcctaatttatcattactattataacgtaattttgcttaaggataaattataaaatgaatttattgccataatattttcgaaattctatactattataaaatctatgaaaataagaggttttaaatatgacaacaattaacccaacaaactacacattattaaagaaacaagcagcaagccttattgaagatgaacatcatatgattgcgattttaagtaacatgtctgccttattaaatgataatctaaatcaaattaattgggttggcttttacttattggaacaaaatgaacttatacttggacctttccaaggacaccccgcttgtgtccacattccaattggaaaaggtgtatgcggtacagccgtttcagaacgtcgtacacaagttgtagctgatgtccatcaattcgaaggacatatcgcttgtgatgctaatagtaagtctgagattgtcgttccaattttcaaagatgataaaattatcggcgtcttagatatcgatgcccctataacggatcgatttgatgacaatgacaaagaacatcttgaagcaattgttaaaattattgaaaagcaactcgcataaaaggacatcagcattttcaataaagtgttgacagttagcaggaaaatgttacaataatctttgtgtgaattaacgaaagtagcagttgtatattattgagcgctatgttgttcccaatgcggacgtgtcacgtaactgtcgctataaggtgaagacacataaaacaatatatcttagtaagcatgcaacactcttttttgtttattcataacaacaaaaaagaattaaaggaggagtcttattatggctcgattcagaggttcaaactggaaaaaatctcgtcgtttaggtatctctttaagcggtactggtaaagaattagaaaaacgtccttacgcaccaggacaacatggtccaaaccaacgtaaaaaattatcagaatatggtttacaattacgtgaaaaacaaaaattacgttacttatatggaatgactgaaagacaattccgtaacacatttgacatcgctggtaaaaaattcggtgtacacggtgaaaacttcatgattttattagcaagtcgtttagacgctgttgtttattcattaggtttagctcgtactcgtcgtcaagcacgtcaattagttaaccacggtcatatcttagtagatggtaaacgtgttgatattccatcttattctgttaaacctggtcaaacaatttcagttcgtgaaaaatctcaaaaattaaacatcatcgttgaatcagttgaaatcaacaatttcgtacctgagtacttaaactttgatgctgacagcttaactggtactttcgtacgtttaccagaacgtagcgaattacctgctgaaattaacgaacaattaatcgttgagtactactcaagataatacgttcaatacaaacacccacaattgtgggtgttttttttattaatttaaaaatgatagattcaaaattatatggagctaccctattttacaatcaacttagaatttacaagtcttatttgtttaattatctttagtatttcatcattagtttttaaaattatcaattgcgatatacgaatcctcatccctctatcaaattaccattcatcgtctcacttaataaataatttcggattatctgtaattaatccatctacacccatttgtcttaatttttctccagttttcaatttattaactgtgtatggcataacctgtaattgatgatgatgtgctttatcaacaaattttctggccactaatgcataattaggattaacataactagcaatttgagcaattcttgaaaagtttggctttttataccaataattacgtttactacaaagcacacctaattcatatatactgcccaatgtgtttaacttttcgatgcattcgatatcaaaagattgtataactacttgtgtcgcatcgactttcttttcttccaaaaatgccagcaatttacattctatttctggatataaattcggacttttcaattcaatcaaaagctttttatcatactttaagcataatgaaagtacttcatctaacgtgggtattcgttctcccttaaaagcaacatctttataactaccaaaatcaaatgattttaattgcgataatgtgtaatcagcaatacgccccttaccatccgatgttctatcaattgtttcatcatgtatcacaacaaaatgttggtctttggtcaaatgaacatctatttctaacatagcaacattgagccccattacctctcgataaccgaccattgtattttcaggaaaatcactcggtaatccacggtgcgaaacaatttgtaattcatctttcagtttattcagagtcattgataagtcacctttctgttaaactttgataaactattctaaaattaaactatcacaattatattggaggttaaagcaattgcatcaacatgactttaaagtccaaacttcttggcaaggtggtcgtaacaatgtcggaaacgttcaaggcgacatactttcagagaatatttcaatacctgcttctttaggtggtgttggtataggaacaaatcccgatgaaatgttagtatcagccgcttcatcatgttatatcatctcattagcagctactcttgaacgtgcaaagttcacagatatttcaattgaacaacaatcgattggaacagcttgtttaaataatggaaaattcagtatgtcaaaaattgtgcaccatcctcacattgaaattccaagtgatcaaatagcacaattagaaaagcgattaccaaaattgataacaattgcagataataattgcatgatttcaaatgctgtaagaaataatgtagacataaaaatctatcccatcattcaggccaaataaaatcgttacgtgataacgtttattcgacaatatagcgttatcactttttttaggcttttaaattttcagaaaatttgctaaaatagtgaaatcttatttataggaggcatataaatgtattatcatcaaccgttgttattaacacctggcccaacccctgtacctgatgccattatgagagaaattcaagcacctatggttggtcatcgttctaaagattttgaagacatcgcacaacaagcatttcaaggtctaaagccaatatttgggagtcaaaatgatgtacttattttaacatctagcggtacaagcgtcttggaggctagtatgttgaacattgtaaaccctgaagatcacttcgttgtcattgtttcaggtgcctttggtaaccgatttaaacaaattgcacaaacttattacaaaaatgtgcacatttatgacgtaacatggggagaagctgtagatgttaaagatttcatcaattacctttcaactttagatgttgaagttaaagcagtatttagtcaatattgcgaaacatctacgacagtgctacaccctattcacgagttaggaaatgccatcaatcaatttaatagtaatatttattttgtagttgacggcgtaagttgcattggtgctgttgatgttgacattaacaaagataaaattgatgtacttgtttctggtagtcaaaaagcaattatgttacctccaggattagcttttgtagcttatagccaccgtgcaaaagaacgtttcaaagaagtaactacgccaaaattttatctagacttaaataaatacatttcgtcacaagctgacaattctacaccgttcacaccaaatgtgtctttatttagaggtgtaaatgcatacgttgaaaccgtaaaagcagaaggtttcaatcacgtaatagcacgacactatgcaattagaaatgcattaagaagcgccttaaaagcattagatttaactttattagtcaatgataaagatgcatctccaacggttacagcattcaaacctaatacaaatgaagtgaaaataatcaaagatgaacttaaaaatcgctttaaaataacaattgctggtggtcaaggccatcttaaaggtcaaattttaagaattggtcatatggggaaaattagtcctttcgatattttatcggtagtatctgctttagaaattattttaactgaacaccgtaaagttaactatatcggtaaaggtatatcaaaatatatggaggttattcatgaagcaatttaatgtactcgttgcagatcccatatcaaaagatggtatcaaagcattattagatcacgaacaattcaatgtagatattcaaactggcttgtccgaagaagcattaatcaaaattataccttcataccatgctttaatcgttcgtagtcaaactacggttactgaaaatatcataaatgctgctgattctttaaaagtaatcgcacgcgccggtgttggtgtagataatattaatattaatgctgcaacattaaaaggtattttagttattaatgccccagatggtaatacgatttcagctactgaacattcactggcaatgttattatcaatggctcgaaatattccgcaagcacaccaatcacttacaaataaagaatggaatcgaaatgcatttaaaggtactgagctttatcataaaacattaggtgtcattggtgctggtagaattggtttaggtgttgctaaacgtgcgcaaagtttcggaatgaaaatactagcttttgacccttacttaacggatgaaaaagcaaaatctttaagtattacgaaggcaacagttgatgagattgcccaacattctgatttcgttacattacatacaccactaacacctaaaacaaaaggcttaattaatgctgacttttttgccaaagcaaaacctagtttgcaaataatcaatgtggcacgtggtggtattattgatgaaaaggcgctaataaaagcattagacgaaggacaaattagtcgggcagctatcgatgtgtttgaacatgaacctgcaactgattcgcctcttgttgcacatgataaaattattgttacacctcatttgggtgcatcaacagtcgaagctcaagaaaaagtggcaatttctgtttcaaatgaaatcatcgaaattttaattgatggtactgtaacgcatgcagtgaatgcacctaaaatggacttaagcaatatagatgatactgtaaaatcattcatcaatttaagccaaacagttggtgaattagctattcaattaatgtacaatgcaccaagctctattaaaattacgtacggtggcgacttagcctctattgatagtagtttattaacacgtacaattattactcatattttaaaagatgatcttggtcctgaagtcaatattatcaatgctctaatgttgttaaatcaacaacaagtgacattaaatattgaaaataataaagcagagacaggttttagtaactacttagaggtagaactatcaaacgatagcgattccgttaaagttggcgcttctgtctttacaggtttcggtccaagaattgttagaattaataatttttctgtagacttaaagccaaatcaatatcaaattgtgtcatatcataatgatactccaggtatggtaggaaaaactggcgcattgttaggtaaatacaatatcaacattgcatctatgactttaggtagaactgaagcgggcggagatgcgctaatgattttatccgttgatcaacctgtttcaaacaatataattgatgaacttaaacaagttggtgaatacaatcaaattttcacaactgaattgacggtacagtcataaacaatttatgtaaattcaaaatgccaagaagacattggattacttccattgcttcttggcattttttcattattaatttcattgtaactcaatatgaaacctttggttcaatcattcacttcaagttatgctgtcaaacaacaatcaaattacaaattatctagtacacctctaagttcacctaaatgattaataacatagtcggcatgatgcgcttctaactcacctgcagcatccttaccttttaaacctgttaatgttccaataaacgttgcacctattttttgagcacttaataagtcagctaacgaatcgcctactataaatacgtcatctttatttacaatgttatcttgcttattgatataagattcatatttatcgcgattattaccatataaagctgcgatataactaaaaggattcggctttcctaatggtcgtgcttgcggatacatattctctgcttctaaaacatcacttgctgttgcaataaaatcagcttcaaaatatggtaacaatcctaaattttcaaatggcacaacagtctcagtataaggacgacctgttgcaatacctaattcgaaaccagcaccttttaaatcattcagaagtaccttaacttcatctactggtctcaaaataatttcttgataaatataacctgtcttaaaagtagttcgtgctattttcttttcaacatcttcatacaacttcgatcctaaataccattcttgataaacttcttgcgctaacgtccataatgcacccttcaaactaaataaagtagcatccgaaacatgtaactctgttgttgcaaactcttccaaagcagcataaatattatttttaccaacttttacattatccaaaaattgtaaaggtagttgttcatttaaattaaaacagtctgctaagtttgtgcttatattttgcaacttcaattcgacaggctcatcttgatacatgaatgcctcaatttcatcatgtgataactttttcaaaatatcaattaaatgaatactaaaaacgataaataacatatcccaatttgaattcagccctagcgattttaatttgtttaaaatcttatctttttgaaaaattcgattcctaatgtcttgtatatcgttatcagtcaaagtttcccaatctatatgtgaatgaagacctaaataacacttatccattaataattcatataccgttaatgcagagacatcgaaacaacgttcttcacttaaaaaaatgccatcaacatcaaataaaattttcttcacaatccccactccatttctgaaaattcagatataaatcattctactatttgactaaaaaaagcgcaaaccctattgaagttagatttgcgctttagctgtttaaattttataaatgtttttcaatttcatcagcaacctgctgtacgtgtgtaccgacaataacttgagttgaatgtttgccattaacagtaacaccaactgcaccggcgtttttaatcttctgttgatcaataatagatgtgtcttttaactctagacgcaaccttgttgcacaattggttaaattaacaatattctcttgaccgcctaaaccttctaatatttgtatagcatgttgatgatatttactttgtttaatatcattttcaccaggagcaatattatcttttacaactgttggatcaactaattcattttcacctctaccaatcgtattcaagttaaatacttggattactacacggaaaatcacatagtataagatgaaaaatacaacaccttgaacaagcaacatcaatggatgatttgatactggattaattagtgataacacataatctatcaaacctgcactaaatgaaaatccagctgtccaatggaatgtagctgcgataaataaagataatcctgttaataacgcatgaacaacatataagattggcgcaacaaacataaatgcaaactcaatcggctctgtaacaccaacgaaaaatgctgcaactgaactcgctaggaaccaaccgtaaacttgttttttctgagtcgttttagctgtatgatacattgctaacgcagccgctggaataccgaacatcatgattgggaagaatcccgcttgatagcgtcctgtaataccttttatagcatctttgccactttggaatttaccaatatcattaataccaatcgtatcaaaccagaacacactattcagtgcatgatgtaatcctgtaggaattaataatctattggcaacaccatatatgaaagctccaaacgatcctaaaccgactatagattcaccaaattttacaatccatgaataaagtagtggccataagaataacaatatgacaactaaaaatgtacagtaaaatgcagtcataattggaactagacgtttaccactaaaaaatgataatgctaatggtaattctgtttcactaaacttattgtatgcataggctgctattaaacctattacaataccaacaaagacattgccattattcatcttttcaaaagctgaatttatttccgaagctttcattcctaataaaggcgctaatttcattggtgataatacaactgtaactaaaaaatatcctaacgtagctgcaagcgcgactgcaccatcatttttctttgccattcctatagctacaccaattgcaaataaaatacctaattgctctaaaatcgtagtacctaccgtagtaaagaacattgcgattttcggcgtcgcatgaagtgcatttaacgtattaccaattccggcaataattgctgcagccggtaaaatggcaactggtaacattaacgaacgccctaaattttggaaaaatttatacattgaatgtcatccttcttaaaataaggtagaaatataaagattactaatgtaactagaataactacttcgatactccgttatagtcacctaggcatactaaccagctatatttctacctcaagttattttataaactttttacaatttcatgcaattcttgttgtaactttgctgttcgtgtttcaatctcttttgtaatgtaatcgatacgctcgtttcgttttaaatctttaggtaaatcgttaatatcgattggtttaccaatatttatgtatgcttgtcctgttaaaagaccatgaatcttagtaggaccaacataagcaacaggtaatattggtgacttacttaacattgcaattgttgaagcaccacgtttcaatggtgcaccttcttgcgatgtgcgagaacctgttgggaagataccaactgtcttattatctttcaacaaattgattgggcgttttaaagtactaggtcctggattttcacgatctacaggaaatgcatttaaagacgttaaaaatttaccaatccatttatttttgaataattcttttttagccatataatgaatttgattaggatataatgccatacctagcataataacttcgttataactttcatgcgtacaagttacgacatatttactatccttaggaatattatctttaccgattacgtataatgattttgacattttaactaaaatgaaattcaaaatcttactaatcactgaatacattgtgccacctacttaacttatttgtttataacaactagattttatcactatatttttactagaacaagatagtctgaaaatacatctaaagttgtatagtgtattactagcaataattataaaaaaaagacataattaaagcatatataaatcatataatggaggttaagtatgtcagattttaatcatacagatcattctacaacaaaccatagccaaacacctagatacagaagacctaaatttccatggtttaaaacagtcatcgttgcattgattgctggaattattggtgcacttctagtacttggtataggcaaagtattaaatagtacaattttaaataaagatggttcaactgttcagacaacaaataataaaggtggcaatcaattagacggtcaaagcaagaaattcggtaccgttcatgaaatgataaaatctgtctcccctacaattgttggagttattaacatgcaaaaagcatcaagtgtagacgacttattaaaaggcaaatcatctaaaccatctgaagctggagtaggttcaggtgttatctatcaaataaacaacaattcagcttatatcgttacaaacaatcatgttattgatggcgcaaatgaaattagagtccaattacataataaaaaacaagttaaagcgaaattagttggtaaagatgcagtaactgatattgctgtacttaaaattgaaaatacaaaaggtattaaagcgattcaatttgccaactcttcaaaagtacaaactggcgatagcgtattcgcaatgggtaacccattaggattacaatttgctaactctgtaacatctggtatcatttcagcaagcgaacgtacgattgacgctgagacaactggtggcaatacaaaagttagcgttcttcaaacagatgctgctattaacccaggtaactcaggtggcgcattagtagatattaatggtaatttagttggtattaactcaatgaaaattgctgcgacacaagttgaaggtatcgggtttgctattccaagtaatgaagttaaagtaacaattgaacaacttgtaaaacatggtaaaattgaccgcccttcgattggtattggtttaattaatttgaaagatattcctgaagaagagcgcgagcaacttcatactgatagagaagacggtatttatgtcgccaaagctgatagtgatattgatcttaaaaaaggtgatattattacagaaattgatggcaagaaaattaaagatgatgttgatttaagaagctatttatatgaaaataaaaaacctggtgaatcagtcactgttaccgttatccgtgatggtaaaacaaaagaagttaaagtgaaattaaaacaacaaaaagaacaaccaaaacgtcaaagccgatcagaacgtcaatcacctggccaaggcgatagagatttctttagataatttacagacagaaaagtacattaagagcctactcattacattcttaggaatgaatatgagtaggctctaatttatttagctatgcaattatatttattgatagttaaccatgaagtattttttcttaccgcgacgaataatcgtaaattcgccatcaattttatcttctggtgctaaagcataattaacatcttgttgtctctcaccattaatataaatcgcaccattgttaacatcttcacgtgcttgtcgtttagaaggagaaatgcctgtttcaataaggacttcaacgatatttgttgtgtcatttgataatgtcacttgaggcacatctttaaatccatcttttaattctttcgctgataatgattttaaatcaccactaaataatgcttgtgaaatacggattgcatcatttaatgcatcttcaccatgaataaatttagttacttcttcagctaatgttttttgagcttcacgtaaatgcggtgcttcatttttagattgttctaagcgatcaatttcttcttttcctaagaaagtaaagtattttaagaatttaattacatcttcgtctgattgattaatccagaattgataaaattcataaggacttgttttttcagcatctaaccaaacagcacctgactcagacttaccaaatttcttaccatctgatttagttacaagcggaatagttaaaccgtatgcgtctgtttgaccatacatacgacgcattaattcaataccacttgtgatattaccccattgatctgatccacctacttgaatcttacaattcaattctctattcaaatgaccgaaatcaatagcttgtaaaatcgtgtatgtgaattctgtatatgaaataccatgttctaaacgactttggattgaatctttacctaacatgtaattaacgccgacgtgtttaccatagtcacgtaaaaagctaattaatgagatttgtcctaaccagtctctattattaacaagcactgcaccatggtctgttccaaactcaaaaatattgtgcatttgcttactaataccttcgatatttttatctacttgttcttctgtttgtagcacacgttcttctgatttacctgatggatcaccaatcatacctgtaccaccgccaattaaaacgataggacgatgtccatgttcttgaaaacgtcttaatgttaagaatggtagtaagtgaccaatatgtaaactatctgccgttggatcggcaccgcagtataacgtcacttgttctttatttaataaatcttcaataccttgttcatcagtttgttgataaataagacctctccattttaaatcttcaattaatacattcgtcattattatttcctcctatttataattatttattgaatacttgttaaaatactttaaagttttttgaacgtaaaaaaaacccttacaacaaatatgtaagggcgcgattgcacgttaccaccaaacttaaacataatcataagataatgttcactctattaatgatacgttcattaataaacgtaggacatgttagttataaaggtgtattcatattattaaaaacactagttcacagcgaccactagctctctgatgatttcaaataatattacttgtccttttatcctattctttatgcattttccctaattataattaacgttaaaataaaagtcaaattgcttaaatatggtatactatacgtaatttaggaggttaaagatgacgaatcaagacaacaatcatcaattgaatcatcgtatatatcattttgaaaagatatataaagctatcaaacatgtcattgtttttatatttatgattttcattgccatcgttgctatcgctgtgattgcgatgtctttatattttcatcatttaactaaaacgtccgactcattatcagatgatgctttaataaaaaaagttcgacaaatacctggcgatgaattattagatcataataacaaaaatttattatatgagtataaccattctcaaaactcactcattataggccctaaaacatcaagtccaaatgtcattaaagcattaacatcatctgaagacactttattttataaacatgatggcatcttaccaaaggcgattttaagagcaatgatacaagatatttttaatactgatcaaagttcaggtggtagcacaattacacaacaacttgttaaaaatcaagttcttaccaacgaaaaaacatatagtagaaaagcaaatgaacttcgcctagcaattagattagaacacctactctcaaaagatgaaattatatatacatatttaaatatagttcccttcggtagagattataatggcgctaatatttccggaattgcatccgcttcatatagtttgtttggtattccaccaaaagatttatcaattgcacaatctgcataccttatcggtttgttgcaaagcccttatggctatacaccctacgaaaaagatggaacgttaaaatcggataaagatttgaaatatagtattcaaagacaacattatgtattaaagcgtatgttaatcgaagatcaaatcactgaaaaagaatacaacgacgcattaaaatatgatattaaatcacatttgttaaatcgaaaaaagcgttaattgatgctcactttttaaagtaaccacaacaatgcatccaaatattaaaaacagcagtaagattattttcaattagaaaatttctcactgctgttctttttatttactctaaaggaaagccattaaaccaatcaatagtttataaattaattgctttcacattgtttacaaagttaaccatacatatgctatatttagttaattatttagattcttttctgaatttaggaatgaataaagctaacatacctaataacgcatataagccccaccatgattggcttgaagttgtttctccagtttttggtagcattttagattgactaagtttgttttctttcgatggtgtgccggctttttcttttgttttcactgttttatctacagttttatgaatatcactcggcagatgttcagttgtttttttgtcagtaactttgtctgtattattataattttgtttcactacgtcaagctttgctgcttttccagtatgattatttttatcgacaatatgagcaagctgtatgactttgtctttatttttattagagtctttatcagtatcgacattcgatgacataccaacgctattatccacatttctatcagtatctttggcaatttgagtatccatttcttttaaatcatacttatcgaagtgattattatccgacatatcggataaatgatcaacatcatgttgcacatctttatcaatattattatcagcatctttaaccacgtcagactctggttctatcacatctgctttatcagacgcatctttaggatttgttgcagtgctgctattttcagctacatctgtatcagcaaccttaccttcttgtcctgtttgtacatttagcggttcactcgtgttattttgtgatgtatcatcatcttttgtattgatatcctgatttataattctgacatgatattgaccttcataaccaatgtttgccacaacgactttaacaatcgcattgtaaactgctttgtcaggtatatatgggaaaatcaacgttctagaattatttttaggatctttagaaacagtagtgacacgtttaccttctacaattaaatctttccagtaactgtcatcctttgttttcatcactacatatttttgaccatttaaagttgctgtatagaatggatgttcaacaaagccgtccataactgactcactattttcttcactttcaaaaacaacaaaatgcgcttcttgtaaatctgttaattgatcatttgtaggtgtaacattttcaaattccgtcactgctgatttaacctgatcagctaactctactctagtttgatctaatttctttttatattccgccttatatttttctggcaatttctcttgtaatttttctaattcataaacttgtctttctaacgttttagctttgtgatacggagctaataatttttgtaaattgtatgtttcctcatccacatagtcgtctgggttattagtaataggctgtgcaaagaccattagcgtataatcatagtcttcatggatgttctcaccatattcaatagatgacacaattttaacgtctctcgtaccattagatactgggaaacgaatataggcataatctttatcagaatcatatgatactaattcgactggtaactttttgtcaccttcataaacttcaaatttcttccatgttgaagctgtctttaaacctaactcaattactggacctgtttttgtaaaaatgacagttgctggttcaacagtactagcataatgatagaactgtctttcacctttatcatttttcatttgaaaatcaattggtcgccaattatcagctgtatgttctttatcgatgatagccgggtttttaattgcatcttgtagtgattcatctgctggtggatactgttgattaacatccgactgattacttgactcattcgttttatcgttagtattaccattagaatttgtttcatgagctggttggcttgacgcttgatctgcattcgctgacgattttggttgtgcaggttgactcatatttgtcgttgcctgcggttgattattagcattgttggtcgttgatgtattttgattagatgtattcgtgtttgtttgattacttgcgtctgaacttgattgatcattcgttactactgcatcatttgtatctgatttcacaagtgaaggatcgttataaataggtttagcaaatactaatttagtataatcataatttgtttcttctccatcatcaatttgagtcgaagaaacaattttcaattcttgtgtgccatctgaaactgggaatcgaatataggcatggtcttctggtacaggactatatgatacaagtctcactggtaatttttgattgttttcatagacttcaaactttttccatgttgaagcagtattgatgtctaattcaacttctgctttctttttagtgtaatacacatctgctggatctttgatgctgaaaaagtgatagtactgcgtttcattgtttttatctaataactggaaattgacttgttctcttggacctatatcatgttctttattttctaatgcaggatctttaattgcatctttaagtgattcatccgctgcaggatagtttttcgcagtgattactggttgcgtagcaggttgtgtttgatttgtatccttaggttgctgagttgtagttgcattattattttgattttccgagattttatctgaagtatttgtattttctgctgcttgcgcttgatgttgagaagtaattaaaaatagtgtactgacaatgaccgatgcaacgcctagagttgattttctaatagaatagaaagaccttaattttgggtgatgtttgttcatgttgttaacaactcctataagattatatttaattgataataattatcaatatcaattattagtgttaattgtagcgcatcccaattaaatattgcaacctattttattaaaattttttaatatgaatattcattgcatcgctttcctattcttcaaacccactttttatcttcatatacattaattaaccaccttcaaacattgtcgttagattcgccaaatggaatctatttttagcacagcaaaaaaccgaactgctgaaataatgcatctccaacagtccggtctattaaactatttacttatctttattaaacaattgacatgatttattagaataacccaattgcatgaccatcatcagtaacatccatgtttaatgctgctggttttttaggtaaaccaggcatagtcatgattgcacctgtcaacgctacgataaatcctgcacctgttttcgcttctaattcacgaattgtaatttcaaatcctgatggtgcacctaacaacgtttgatcatctgagaatgaatattgtgttttcgccatacatactgggtaattatcccaaccattttctttaaattgttttaattgtttttgcgctttactgctaaacgttacttttgaaccgccatagatttcagtcacaatcttttcaatcttttgctctaatggtaattctaattcatataaaggtttaaatgaattaggttgatcaatgacttctaatacttcatttgctaagtcaacgccacctttaccacctttttcccaaacttcagttaaggcaattcgtacgttattttctttagcccaagattttacatattctacttctgcatcggtatcatgtataaatgcattaattgcaacaaccggttctacaccgaattttttaatattattaacatgacgctctaaattaacaattcctgcttttactgcttctacattttcttcttttaaattatctttcgctacaccaccatgcatttttaacgcacgaattgtcgcaacaacaacgacagctgccagatcaaatcctgcttcacgcgctttaatgtccatgaatttttcagcgcctaagtctgaaccaaatccagcttccgttacaacgatatcagctaaatcacgtgctgtttcagttgctaaaattgagttacaaccgtgtgcgatattcgcaaatggtccaccatgaactaatgcaggtgtcccttcaattgattgtactaagtttggtttaattgcatcttttaaaatcattgcaagtgcaccttgcacttttaaatctgcaactgtaactggcttgcgatctctagtgtaaccaatagtaatacgactaattttatcttttaagtctttaatacttctacttaaacataaaatcgccataatttcagacgctactgtaatattaaagccatcttcacgtggtacaccatttgtaggtccacctaacccaacgtttacatgtctaagtgcacgatcattcatatctaatacacgtttccattcaatacgtctttgatcgattcctaattcattaccttggtgaatatgattatctataaacgcagacaatgcattatttgcagttgtaatcgcatggaaatctccgttgaaatgtaagttgatatcttccataggtaagacttgcgcataaccaccaccagtcgcaccacctttgataccaaatgttggtcctaaagcaggctctcttaatgcaaccataacgtttttatttaactcatggaatgcatcagctaaaccaactgtaaccgttgatttaccttcaccagctggtgttgggctcatcgcagttactaaaacaactttccctttgttttctcttggcgtaattttattaatgtcgattttagctttgtaatgaccataaggttctaatgcatcctctgaaatacctactgatgcagcaatatccttaattggttgtagtgttgattgattcgcaatatctaaatctgataaatgagtcaacttttttcgcccctttttgtttaatttatgcatttataatatgtaagttgtagctaagaaatttttacttacattcatataataacgaactgttaaaaacttgtcgactaaatcgggttagcgctttcatttttgcaataaattcacttattaaagttttgtattataaaacttttagcgcttgatactattgataactatatttttctattatttaaaataatcatcttccaaagatcatattaaaaataaaaagcaatataaagatatgccataattgttatgtcatcattttcaaatgctttctacgaaatgatatgacacaagttaacagctctttatattgcttatcgtaaagtaaacgattatttaaacattgacatgaaatatgttgtcaccctttattcttcgaaaaaaatcttcaataacattcatgtcattattccattgtacttaaatccccagcatctaaatttaattcccaagcttttaatacacgtctcataattttacctgaccgtgttttaggtaatttatctttaaattcgatttcacgtggtgctgcatgtgccgacaaaccttctttaacaaataaacgaatttcttcttttaattcgtctgttggttcatatccttttctcagtgcaacaaacgccttaattatttcaccgcgaaccggatcaggtttaccaataattcctgcttcggcaactgcttcgtgttcaaccaatttagactcaacctcaaatggtccaactcgttcaccagctgtcataattacatcatcaacacgtccttggaaccagaagtaaccatcttcatctttatatgccgaatcaccagatacataccagtctccaataaaatatgatttatatttttctggattcttccagatacgatacatcattgatggccagcctttttttatagcaaggttgcccattcgatttggtggtaattcattacctgcatcatcgataattgcagcttgaataccaggtaatggtttgcccattgagccaagcttgacgtccatcgttggatagttaacaatcatatgtccacctgtttctgtcatccaccaagtatctaacaccgttaaaccgtatacttttttcacccattttataacttcaggatttaaaggctcacctactgatagaatcgaacgtaacgatgacaagtcatatttctcaacaatatcgtcaccagcactcattaacattcttaaagctgttggtgccgtataccaaatcgtcactttaaaatcttcaatcatactataccactgttctggtgaaaagcgaccaccagctatacaatttgtagcgccatttaaccatggtgcaaaaataccataagatgttcctgtaacccaacctggatctgctgtacaccaataaacatcatcttcttgtaaatctaatacatattttccagaaatatagtgcactaacattgcttgttgaacatgcaatacacctttaggttgcccagtagaacctgatgtataatgtaaaatcaaaccatcatccgactttaaccattcaatgtcaaattcatcgctagcagtttccatcaaactaatgaagtctatgtaattgtcttctacatcctcatctacgacaacaatttttttcaagttcggtaatttatctacaggtactcgaggtaacaatgccttattagtaattaacactttagcttcactgttctctaatctatccgcaactgccttttccataaatgcttcaaataacggcccaacaattgcaccaatttttaaaacacctaacaacgcaaaatatagttcaggtgtacgcgacataaatataaatactctgtcacctttgtcaacttctgcatgttcagacaaaacattcgctgctttattagataaccgttgcatatctttataagtatacgattcttttctgtactcatctttgtaatttaacgctattttatcccctaatccttgatctacatggcgatctatacattcatatgccatgttcatttttccagtttcactccaagaaaatgcttgttctacgtctttccaatcaaaagtattatatgtttcttcataatctttaaggttatgtttaccttgcgctcctttataaacttcgactttcatttgaaactccccctttgttatgtgaaaacgctttctttctcaatattatacataacatttctaattattcaaaatttttacttttatcctttttctagtattaattattgtaaattttctatataatgaatttaatacaatcacgacgtcgattgaggagttgaaaatatgaatcatttaaagacgtatcaatccgaagattattacattcatgacaagcaatttgttattgaaggtcctttaacatacgaagatttgaaagcgcttactttcgatgcgcatttaaccgcatttagagatgctgaagatcagtatgaagctttgttagaaattacaacattaccagaaggtagaatttatgttgctcgccaagatgaactcattgtgggttatgtcactttccactatcctgatgaaattgagcgctggtctacaggtaaccttccatatttaatcgaattgggggcaattgaagtcagcatcaattttaggcaattacatcttgcagaaaagctaatacaacttagcctttctacaccagaattcgaggattatatcgttataactactgaatattactggcattgggatttaaaaaattcaaagttagatgtatttgactataaaaaattaatgcagcggttaatggcaactggtggacttgaaatattcgctacagatgatccagaaataacaagtcatccagctaattgtttaatggcaagaattggcaaaaatattacattagaacagcaacaagcgtttgatgatattcgttatatgaatcggtttttcttttaatttttggaatatcggagggattatatgcaacaacattcatcaaaaactgcatatgtttattcagataagttattacaatatcgatttcatgaccaacatcccttcaatcaaatgcgtttaaaattaacaacagagctacttttgaatgcaaatttattgtctccagaacaaatagtacaacctagaattgcaacaggtgacgaattaatgttaattcataaatatgattacgtcgaagctattaagcatgcttcacatggcattatcagtgaagatgaggctaagaaatatggattaaatgatgaagagaatggtcaatttaagcatatgcaccgccatagtgccacaattgttggaggcgctttaactttagcagatcttattatgtcaggcaaagtattaaatggttgtcacttaggtggtggtttgcatcacgctcaacctggtcgagcaagtggtttttgtatatacaatgatattgcaattaccgcacaatacttagctaaagaatacaatcaacgcgttttaatcatagataccgatgcacatcatggagatggtacacaatggagtttctatgccgataaccatgttactacttattctatccatgaaaccggaaagtttcttttcccaggctctggtcactatactgaacgcggtgaagatatcggctatggacacactgtaaatgtcccacttgaaccgtatacagaagatgcatcatttttggagtgttttaaattaacagttgagcctgtcgtaaagagttttaaacctgatattattctaagcgtaaatggtgtcgatatacattatcgtgatccactaactcatctaaattgtacgttacattcattatatgaaattccatattttgtaaaatatttagctgattcttatacgaatggaaaggtaattatgtttggtggcggaggctacaatatttggagagtcgtaccacgtgcatggagtcatgtattcttaagtttaattgatcaaccaattcaaagtggttatttaccgttagaatggattaataaatggaaacattattcatctgaattattacctaaaagatgggaagatcgtttaaatgattatacctatgtcccccgcacaaaagaaattagtgaaaaaaataaaaaattagctttacatatagcgagttggtacgaatctactcgtcaataagtaacctaatctgcaacgattttaaaagataaataaaaggcattcttccaacacccatataatttgggtcgttagatgaatgcctaattttgtgaatttattttgtagttcctcggtattcaattctgtgaggtaaaactacatttggttcttctatcttttcatcgttcatatattttgttaataagcgcatccctactgcaccgatatcatataatggttgaataacactagaaagttgtggtctaaccatctcaactaatcgtgtattattgaaactaataatttgtaattcctctggaactttaataccagcatccattgcactatgcataataccaattgcttcttcgtcgctgatacataaaatggcatctggcaaattgcctttcattttagcaaaagcttttacgccttctttataactttcagcaccagaacaattcaatgtatcacctaattgaaggccatttttatttaacacttcagttaaaccttctaaaacatcttcttgagcttttttagaatgttctccacctactaaagcaaatgatttagcgcctttttcaattaattctcccgtaatttctttcgcagcttcagtaaaatcaatattaactgatgctatatgtgcatccttaccatttgttcctgatactactacaggtacagatgattgatttatcaattctttcatttcttcagtaattgtaccaccaaggaaaataataccatcaacctgtttacttaataagttattaaaaatttctttttccttttcaggatcgttatctgaatttgaaataattgagtgatatttatacattgttgcaatatcttcaagtccacgagcaagttgtgaataatagatattagatatatctggaatgatcacacctactgttgttgtctttttactagctaaacctctagcaacagcatttggacgataattcaaacgcttaatgacttcgttaactttatttttagtttctgctttaacattttggttcccattaacaacacgcgacactgtggccatagagacacgcgcttctcttgctacatcatatatagtaactgtcataatttcctccttgtaaacgttttattcattataataacatgttttcatttcattttcatagtttaccatattttaatttacagtaacatatttttgtttggaaaaatttagcgaaaagcttgaaataaaaacaaacgctaaatgataacgaacgatatattttaattttatataaacttttttcatttttaattgtaatgttttgagaaagccttttcaaacatcaattgcatttgttgaaaaatgttcacatttcagcaacaaatgtgtgaatctattatattttacagataattcatagttataattttaattactgctatcagtcataatctttaataattgtgaaattgaacaagtgtcgaagtattataacaatcgttaagtgcagtatacctttatttctatacaaaaaataatagccactctaaaagtaatatactcttagaatggctgtaagtttaaaattgtcgattcaaagataatattctacttcaacatgacatattagttaagtagtctatagtttccttggaatattattttaactttttagcgttatataaatcagctaaaggctttaattcatcataaaatgcttggaattcatctaaatccatttgttgacccgcatcactaagtgcaacagatggatctggatgcacctcagccataactccatcagcaccaactgctaatgctgctttcgcagttggtaacatgatatctttacgacctgtactatgcgtaacatctaccatgactggtaagtgtgtaccttgttttaaaattggtactgctgaaatatctaaagtgttacgtgtcgccttttcataagttcggattccacgttcacataaaataatgttttgattaccttgtgaagcaatgtattcagctgcataaacaaactcttcgattgtagcagataaaccacgttttaatagaataggctttttcgtacggccagcttcttttaataactcgaagttttgcatattacgtgcaccaatttggaatacgtctaaatactcatcagccacttcaaaatcatttggatttacgatttcgctgacaacatttaaatcatatttatctttaatctgtttaagtattttaagtccttcaacacctaggccttggaaatcatatggtgatgtacgtggtttaaatgcaccgccacgaataaatttttcacctttagcatgtaagtttttagcaacagcttcaacttgttcaaatgattcaactgaacatggcccaaatacaaatgatttattgccgtctccaataatgcccccattatcaaatgttacaatcgtatcttcaggtttcaacttacgtgatacgtataagtgtttttcattttcagatttttgtaaatctgtagaggctttaaaaatttctttaaataattgcttaattgtattatcgttaaatggtcctttgttgctatcaattaagtcgttaagcatttctttttcgcgttgtggatcatagatacgtgtaccttgttttaatttttcctccccaattttttgtgctagttcaccacgtttagataataaatctaaaatttgatgattcagtgagacaatctcacttctgtatgattctaatttattactcatccttactcacctctacgaattatttcaagtatattccactttaaagcaataaaatataatgttaaaaaatattctaacaatatcatatgtatagttcaaccctaaattgacagaaaataatcaattttctaattatatgattcgagactgacatttcgattttctcagtcattattggaaagttatattctatattgatatttattagcaaatgttaatcaattaaataagtgtcattattatagcttattttgagtcaacattactgcttttaagaaaaattttcgtttctatcttctattataaatctaaaattctcatacattcaacctaacgcttaataaaaattaacaacctttgtatattaatataaatctatagtgaacatcactcaccaacatgagcggctatatttgaattagtgaacgtcattgtaccttctaagattcattgtttatttgattatcgaatatttttccatcttcagcttaaaatgtgcaatataactattgttatctaacgatgtttcaaacagcataaatacatgaaatgatcgcgttgcctttcaaaataaactgatgatatcaaaaaaggtaagcacctgaatgcctaccttttattttgaaattcaatttttaaaaatataatacatagcttactgctatgattgattattcaacgattttagtaatcttagtcattgaatgtacgtttctctattttactattagctttttcaactttagcatttggcgtttttgatgcattggatgatttagcatttgttgtttttgaattcttattactagtttgattattcttttgagttaacttacttgaactactttgtttctttgcaccttgtgatgatttcttattatgttgctttttctgacctgaagttttatttgtagatgcttttgatgcatttcgtttatttgaaggtgttgtttttttagattgtttacctgatttcttgtcaacagctgtattattagttgttttttcatcagctttacgtgtaataacaccattttcaaatttagcttctttttgtttaacagtgtctttattatctatattaaccgtctctgtctctgatacatcattctttttagtaactaattgaggaatttctttcaagtcatttttagcaactggtttttctgcaaataacgcttcagttaattgactctcttttgaacctggtgttaatttagcttgcttctgttttgcagcgtttgctaatctttcagcttgtgactctggttttgatacttctacctttgctgcacttgcatctttagttgatgtgtcactgtctttctctgcttgtgcttcttttttagcttcttgaacctcttgtgcctcttgtgatgtatcacttaaattatttgcacttgcttcttcttttatcgctgcttgttgtgctttcaatgccactgcttttggttcttcatttgatacagctgcacttttatctgtttctgcttgtgcttcttttttagcttcttgaatctcttgtgcctcttgtgacgtgtcacttaaattatttgcacttgcttcttcttttattgctgcttgttgtacttttaatgccgatgcttttgactcttcatttgatacagccacacttttatccgcttctgcttgtgcttctcttttagcttcttgaatctcttgtgcttcttgtgatgtatcacttaaattatttgcacttgcttcttcttttatcgctgcttgttgtgcctttaatgccgcttgctcatttttagatttgtttaaaaatccttcaacacgttcttttgtataggcaaccgtttcttcaagttgcgtttttctttcttcaaacttttgcgacagttcttgttctttgacttttaaatcatctgctttttgataaactttatttttaaaatacaaacctaaagctgaaccaacaagcgcgccagttataaaactaacaacaaaatctttacggtttggtagtggttcattttgataagtgtgtttattttttaatgttcttttatcattttgttgctgcgtcatttgtatatcctcctataacaaatgcacttaaataagtaacaacctcatttaagtgcatttgtttaattattaattatttatctactctagaagtatagctatgatttgcatcagttgctacattattagctttgtaatttgcacttccacgacggtagtgtctattttgccatttgtctgcaatttccattgcaacatttgaccattgaacaacttgtgagattttatcttcattttgagaaatattatgtgtaattgaatttgttacacgatctacagagctgtttaacgtttgtactgagtcaccgatacctttaacagcatctacaactgagtttaaacgatctactttaccttggatatcctcagttaaacggtttactttatgaagtaaatctgttgtttcacgagtaataccttgaacttgaccttctacaccgtcaagtgtttttgcaacataatctaagtttttcttaacagaatttaatacagctacgataccgatacataaaattaagaatgcaatcgcagcgataattccagcaattggtaaaatccaatccattaaaaacgcctcctaattaacatgtaataatgtcattaataataaatacccatactactctattataaacatattaaaacgcatttttcatgcctaatttatctaaatatgcattttgtaatttttgaatatcacctgcacccataaataaaacaacagcattatcaaattgttctaatacattaatagaatcttcattaattaacgatgcaccttcaattttatcaattaaatcttgtatcgttaatgcgccagtattttctctaattgatccaaaaatttcacataagaatacacgatctgctttacttaaactttctgcaaattcatttaaaaatgcttgtgttctagagaaagtgtgtggttgaaatactgcaacaacttctttatgtggatatttctttcgtgctgtttcaattgtagcactaatttctcttggatggtgtgcataatcatctacaataacttgatttgcaattgtagtttcattgaaacgacgtttaacaccaccaaacgtttctaatgcttctttaatatttgtaacatctagcttctctaaataactaatcgcaattacagctaatgcatttaaaactgtatggtcaccatattgtggagacaggaagtgatcataaaactcaccatccacatacacatcaaaagcagtacctttatccgtaatttgaatattttgagcataaatgtcatccgaatctttaaatccataataataaattggaacatctgcttcaattttacgtagatgttcatcatcaccccaagcaataataccttttttaacattatgtgccatttcttggaatgcatcaaaaacatcattaatatctttaaaataatcaggatgatcgaaatcaatatttgtcataattgcgtaatcaggtttataacttaaaaagtgacgtctatattcacatgcctcaaaagcgaaataatcactttcaggcaatcccatacctgtgccatcaccaattaaaaatgaagtctttttatcaccattcataacatgtgataataaacctgttgtagaagttttaccatgtgcaccagttacagctactgaagtatattgatcaataatctgtcctaaaaaatcattataacttacaacatctaatttcaattgatgtgcacgtactatttcttcatggctactcgcgaatgcattaccttgtataactaccatatcttcttttatgttattagcatcaaatggtaatatttttatccccttatttctaagagcaacttctgtaaatacgtagttctcaatatccgatccttgaacttcatgtcctaaatcatgcatgatttgtgctaatgaactcatgccagaacctttaattccgacaaaatgatagtgtgtcattatataaaactccttactcataattattctttatttaaatctgcttccgtaacataaacatcccttggttttgaaccattagcactcgaaacataaccgagttgctctaattgatcgataattcttgctgctctattatagccaatttggaaatgtctttggattaatgatgttgaaatatgtccttcattaaccataaatgcacaaacatcatcaaataattcatcttgtgattgtgtttgtgtttttttcaacaattctttttcttcaaatagatagtccggttctctttgttgtttgataaaatcaacaacatcatcaatttcgtcatcagaaacaaatgtaccttgaactctaatcggtttattcataccgctaccaagatataacatatcgccatatcctaacaagcgttctgctccaccactgtctaatatcgttctcgaatctacacttgatgataccataaatgcaattcttgttggtatgttggctttaattaaacctgtaattacattgacagatggtctttgcgtagctactaacatatgaataccacatgctcttgctttttgagcaattctagcaatagactgctcaacttcttgcggagccatcatcattaaatcagccaactcatcaattacaatgacaatttttggcattctttcatcatatggtgcttttttgttaaatgctgttatattacgtacatggtaatgtgcaaataacttataacgtcgttccatttcttctacggcccattttaaactctgtgtagctgctttgacatctgtaattaccggtgcaactaaatgtggcaaaccattataaggagctaattcaaccatttttggatcgataagtaataatcttaattcctcagggtgatttttatatagtaaagacatcaaaatactattgatacaaactgatttccctgatccagttgcacctgcaattagtgcgtgtggcgttttagcaatatccataagtaatggttcattattaattctataccccatcgcaactgttaatttagattcagcatttttaaaacttggagattcaataatagaacgtaagttgactgtcgttggattttggttcggaacttcaataccaacacgactagttcctggaataggcgcttctatacgaatatctttcgctgccaatgccattttaatgtcatcttgtaatgccgtaattcttgaaactttaacacctttttcaactgataattcaaatcttgtaacacttggaccttcagttacatcttgtacttctgcaggtacattaaagtaaaataatgcgtcattcagttctttctttttatctgtaatccagtcctcgtccgactcaataacttgtggttcttctagtaatgaaacacttggcaatttaatatttgggcctttacgaatcatcggcttagatgtttgtacagcttgatttgttgcaacatcttgttggttcgtccgaggtctattttcattagctgtatcttcattttgatttgaaaatgaaggctgtaaatctttttgttgatcatcattatcttgttgtccactagtattgtttggatgtgttgtttcttcgctttcttcagttatgtcgcttacttctgaaactgaagacgaagttgattgatcaacttgctcattttccaattgattatcatcttggctttcttcaaatatttccgtttgagttgaatcagcagaaggtttctgctctgaatattgttgtgcattttgataatcattttctgtttctgcatgaccaataagttgattgttctcaacattgtttgatgtcatattatttgttttatatgcatttgtgtttgactcttgtgaatcagatcttgatgatggtgcggcttgactcgcaggcttgctttcactcacagcttgtttactttgtacaggctttaattcaggcacattgacttttgaatgctttttacgatccatcatacgctttttatcagatggcgtcatgacaacattaaatggtcttttacttaaagttgaaaccttttcagtctgtttctttggatttacgttttcaatagttttctcttcgacattttgttcactttcagctgcttcgttttgcacattttctgtaatttctgcgttatgcttttctatttcattcatgcttgaatcttccacaacatgaccatcattcacatcattcgttttcaatgagttgacatttaagtttgtttggtcatcttttttatgacgcggtgctaattcaatttcattatcaaccgttttatcgatattattaacttgagattcagttactgcgtgctcttgcgttttaggagcgtctacatgcatttcagacgcgtttctattggtattatcttcgatatttgaagtagtatcctcatctacttctgtatcatttaattcataaaattctgcatcatcgatttgacttcctgaatattcttctttattcgttgctccatcttcttctgaatcagcaattaatctggattgattttttagttcatctttatcatttacttcaacgttatgttgtagtgctgattgatgttgagacgttacattcgaaaccgtaacttcatcatctgacaattgttttgttgtcgatacttgattcaaactaacttcctcataattgtatggactttcatctacatgagtgtcattagtgtcttcattttgtattgacgcttgtttattttcatcatttgatacagtttcattctctatgccatttgtatgaagctgactagcatctgtactattatctgttaagtcactatcatcatttaatgaactatcaccaacatagcgttccgcttgtttagcatacatttcatcaattgcacgttgtattgcatcttgctcttcgtttttatgttcttcacgcttttgttgcaacgcttttttaaatcgacgcttttgaagcactttacgttctcgttcacgtctaatttcttcaacaatttgtgaagcataaatattttcaattttgatagtattatcaacttttgaataattaggcattgattttgttgttgatgatacattttcatcagatgatttagatgcagttccttgtttgacaacactatcattttgtttttcttgttctaattgtttattttgagacgtttgcgtcttagctacatatttatcatatttttgtttatctgactcaactttttctgaaggtttacttacagggatacgaccattttctaactttttaggtttcattgtgccaaaaatagctgacggtacctctgaagtcttgaaactttctttgtgataatctggagttgaatctttagcacgatgatttgtattattagaatacatattatgtgtttttgacttgtgcgtttccttctcaataccattaattgcagaaacatatgtacctggcttattcgtatggtaatgtgaatgatctttatattttatactttgctgtgatattttagaattcccacgttgttcactataattttgttcttcagttgtttgatttcttctacggcgatgtcgtttttgtgaacgagaatcgtggctttgtttgcgatagtctcgatggtattgttctttttcatctgaaatagtatctgcagattgttcaacattttcattttcataagctacgctcataggaaaacggaattttcccctcggacgactataaatatcattattttgaggcagtaatgagtcatgatcgttatctatattttgtgattcttgacgtctttttttctttctatgaatcaagtcatcatttgaatcattatcttcgccgaataatttatcaaaccagctcatattttcactaccttccttaattattcaaaaaatgcttgtccaatttcatagctgtcatttaataccataatacctttttcttcaggtgcattaggtaaattcaattctttcattgaacaaatcataccgcttgaggcaacaccacgtaattcagcatctttaattaccataccgctaggcatcactgcacctactttagcaacaacaactttctgtccagcttcaacgttaggcgcgccacatacaatttgtaatgtgtcatttccaacgtttacatttagtacacttaatttatctgcatcaggatgtttgtctttagtttcaacgtagccaactacaaatttcggtgatagatcagcatttaatttataatcaaaaccagcttctgaaatacgcttttggaatacatttacaagttcatcagttaatttaatatgacctttttcttcaattgttatatcttttgaaatttcaaaaatattataacctacaacattaccttcattagtaatttcaacaacattaccttttttattgtagtttaattcaccttcaactggttcaatttgtaaaaatgcgacatctcctacatatttaggattgtaaaataaattcattatgacaaaactccttatccaattatttctatttatctttattaaatttacgacgatttgcttctaaacgctgaatcacgtttggatctcttttttgtttattatttttacctaaaataaatatcggttcaagatgaccctgtttatatccaaaggataatgatgtaattggaactagacctttagtgaaaaattccattgttaaatgtgccatcacatcatatcctgttttattgcgtatatctgcaataattaacacatcttggtgtggcactgctacgagcatttcgccttgacattgtgcctcaatttcatttaaaaatgcagtatttagtatcctacttgcatcatacccgtcatttgagttaataaaataaaaaatattaccttttacttcatcagtcgtatatgaatttgacaattttctaacattaaacagagacatttctcttatttgttgttcagttaacttcaaatcctctaacatgctttcgtcaattagacgatatgatttccctaaatcgactgcataataaactgctgtttctgcagtatgctcatcatagataaaaggaacaccttgtttagtttttttatcaaagctagtcgctctaatgacaggcataatttgactagatgatatactctcaagggttttatctgccatttgtgcaatagcttcatcaacgtaataaacaatttcatctacaattttttcttttttatcttcatattttgcgactatagcgttaagtttaatcgtgatacctttgttattatctgttcgataaatacgcaaagtttcttcttcacgattaaatttaaaatcaacgtctaaatggcttaaacgttcctttaatttatctctcatttgaaaggtattcatatgtaacactcctaatttcgcaccttataatagtttacaataaatcaacacatagtaacagagaaaaacgagtattaccccgtttttctctagtctaaattacacatattgagctaaaaatgcatctatctgttcaattgattttcgttcttttccaatataacttccaagcagttcaccatttttatatactagaaaacttggaatccccataataccattttcaatacaaatatccataaatttgtcacggtctactgatacgaagtcaaacataggatatctcgcttctaattccggtaaatctggttctatcactctacaatctggacaccagcctgcagtgaattcaaatactgtagcaccttgttttaaagattcaaattgttgttctgattcaagttgtttcatttttatgtctccttaattaatgattatatataactatttagagataatagttgttattacccgattatttatattgtaatgtttctatttgattattatctaaattacaaatggcttctgaaagtaaagatctagctgcaaaatagtctcttatatcaaatactgagtctgtactatgaatatatcgtgcacatacaccaataactgcagtcggaataccaatattagctttatgaatttctccaccatctgttccacctggtgacatatagtattgatgttcaatgtcatgtgcttctactaactttaataaataatctctaaatacaggctttaaaatcattgtaccgtcttttatgcgaattaacgtccctttaccaagttcaccagataatggttggtttcctttaacgtcattggcaggtgaacaatcgactacaaatgcaacgtctgggtctatcatctctgcagatgctttcgcacctcgtaatccaacctcttcttgaacatttgcgccaacatacaagtctacatctaattctatatcttttaataattctagtatttcaattgccaagacacaaccataacgattatcccatgctttagcactatatcgatgttcagataactgtgtgaatggcgtgtgaggtacaattgtatctcctatatctattccgcgctcacgcacctcatcttcattttgagcacctatatctaatgttaaatctttaatttccggtgcaccttcactaccagtacgaaaatgtttaggtatattagaaacaacaccgataattttatcgccatttctatttttaattactaagcgttgtccttgccaaatatcatttgcaacaccacctaaatttgtgaattgaatcattccatttttagtgatatttgtaatcataaatccgatttcatccatatgtgctgcaatcattacacgttttgcatttggatttttagattttttcacaccaaaaaatccacccatacgattttcaataaattcatctacatacggcgccatttgctgagtcatataattttttacttcttcttcaaaacctggtgccccatgaagctcagttaaagtttgaattcgttgtaatgttacttttttatttatgttcataaaagttctcactccttataagttattatatcatcttcaatatggtaaactaatgatatgaatttgaaatcaagggagcataaatgatgactaaactgaaatatataattccaacaataattgcagtagccattgtaattatttctaccatttcaatcatccaatttattaatcgtaaacgctataatcccgttaaagtacttaatgaagtaaaatcatattttatgaatgtcaaaggctcatatatcgtttatgaaccattcgttcatcctgaaactgataaataccgtttagtttatcaaggtggaattacaactattaaaaatggtcaaaatattcattatgatttttatgcagatgcatatactggtgaagtcattaacattgtagagcgttaatacgaattttatccatatttgatttggatcgtaaaacttaaaaatgagccacaccctaattagtaagattggatgtggctcatttttttatttttgaaaatttgtttagtaatacatctttattttagttattatcaactaatgtttcacgtaaaatatatgcatctatgttttcaccatcatcgctgtattttacagcaaagtagttttcatcatgataaaacaagaaccaatattgttgctgaataaaatatggtatcatgcgttctttttcacgaatcgattgcataggataatcatcatatgccgttacccatagaggatttttatgtgcagtagttgggaatatatcacccatatgaactgctttatctccttgactttcaatcgtaataatcgtgtggccaaagctatgacctccactatgttgcatcttgatacccggaaccggttcaaaatgtttttcgaataaaatcaacttgttactataatcgcctttattcttatcccagtaagttgatttacttcttatattaggtgcaataaactcatgccactcatcttgttgcacaacatgaatcgcattttcaaaaattgcatgtcccgcttgatcagtcaaaccggcagcatgatcaaaatgcatatgtgtcattagcacataatcaatatcctttggcgttaaattataatttgccaaatcagcaattatatgactttcttcatctactccaaaattacgtaattgcttttcagataatttaccattaccaatacccgcatctataatcaaattatattgagccgtttgaatcaaaattggatgtgtcggtaaattgatttgatttcgttcatttgcattgtattgctttgaccacaacggcttcggaacaacaccaaacattgcaccgccatccatttttgtattgccaccatttagataatgaatagatatatccccgatcttcataacatcacctattctttctgtattcgttattacaattagcatgtatttattacatcatatcactattcataaatgcgaacaaaaacgaaacgccccacactaatacacttctaactacttataaagattaatgcaatcatattatatgtaaatgcatcataaccatcggcctgtaattttaaattaataattaaaatttacaagtaaaatgcaagctttattcttttaaatcaaaggtatttagtataacattgtttataggcgcattatatcctttagttatttgtttagtcacttttaattatagagataattgcgctttttttatattcaaaatcaaaaaatcggacagatgaaaagtaaaatacttttttccatcagtccgatttattatagaacctttatctatagaaccattatagtacgaaaaaacacttatgattgtatgtgtacataccctcataagtgttttatttttgtgaatggaatttcgcttccatacgataaatacgtgaccctttatccgaaaatttcttttcatattctgttaaaatattactgccatcgtcttcttgatgtaaatttagatttatttttgtaaaatacattccaaattgagacatactttctaaactgtaggcaaatagtcctctgttatcagttttaaaatgtaaatctccttcatcatttaagatttgttgatacaacgctaaaaacgtatgatacgttaaacgtcgttttgcatgacgattttttggccatggatctgaaaagttcaaataaatacgcgaaacttcgccgtctttaaaatattcatttaattcaatggcgtcattacaaataatctttaaatttgttaaacccatctctttaactttatccaatactttataaacgatacttttctcacgttccattgaaatatagttaatatgaggattttgagcagctaatgttgtaataaactgccccatacccgaaccaatttcaatgtgtatcggttgcgttttatcaaaccattcagtcattttccctgcatgttgaccttccatgtcaaccaattcaggatgatcttttaaataatcttcagcccatggtttgtatcgaactctcatattttattctcctcttaaataaacatgttactattcataacttcatttaggaatttaagccaagtgttcatatccttatatcttttttgctcttcataccattgaacaagacctatagattgaattaccgtataccatttcatacgtttatttaaattcaagctctcttgaacaccatatgtttcaagccattcagaccattgttgttgtggaacatagttgtaaagcagcattccgatatcaattgccgggtctgcaatcattgcaccttcccaatcaactaaaaatagttcatctcgatcggataataaccaattattatgattcacatcaccatgtacaacagtgaaaaaacgcgaatctaaactcggtatatgctcttctaaataggttaatgattttctcacaatatgatgtgttaaaacttctcttgataaagaggcattaattttattaagcataatctcaggagtaataggttccatttccatacgctttaacatacttaataaaggtctagaattgtgtatcttctttaataaatgtgcaactcttgtttgcttcatttcgtttgaagatagttcacgcccatttttccaatgttgtgctgtaacaacctcgcctgtttctatgcgtttcgtccatactaatttgggcacaataccttctgctgataatgccgcaataaatggatttgaatttcgttttaaaaacaacttttgtccatcttgttcagccatatatgcttcaccagatgcaccacctgctgaatcaagtgtccaccctaattgataaaactgctccaactcgtccacctcactttcaattagaaaatggctctagaaataggtttttcaagagccatatattctaatttataacaccatactggtacaaatattatgtccagataattattgtaaatcctcaaccaatgcctacattacacgactaattttaaatcgtaatgtctgtcattgacaccatacattctatagtcacttacttgacatataatgttaccgtgtctaaaactacatgtttttgaatctctgtaggcgataaactctagttttcaaaataattgctatcccattttcatggttagcataaatttatgaactgtaacatttacgtacttagtaaaatatgatgcacatcatatttgtaactcatagaaaattttataatttttatcattatatttcaactgaaaatgagaaacaaaatggcactttttactaatatgtgttttctaaacaacacttttaagcttcgttttaaattataacataattcacttacgaaagttgataaatttaagtaatttaatctaaaaatatgatgaaagaattttaaatactgtgtgactctatatacttttcaaatccttcttgtagttgacgtgtaattgggccaactttaccatcattaattggttcaccatctaatttaataacaggtgtaacctcagctgaagtacttgaaacaataacttcatctgcgtttttcaagaaatctacagtaaacgtttcttctttaaatgggatgttatagtcttcggcaatttttttaattacaattcgtgtaataccattaagaatatagttgttaatcggatgtgtataaatcacaccgtctttaattgcataagcattacttgaagatccttcagttacagtttcacctcgatgttgaattgcttcaactgcattatatttcacagcatattcttttgctaatacatttcctaataagttcaagcttttaatgtcgcaacgtaaccatcggatatcttcaacggtaacaccattcacaccattttctaaatgatcataaggacgatcataactctttgtataagcaacaattgctggttctacttcaggtgtcgggaagctatgattcctttcagctacaccacgcgttgcttgaatataaattgccccagtttcaatttgattcatatcaactaatttacgagatagttcaattaattcttctacagaataatttaaatctaaaccaatctcattggcactacgtaaaaatctttcataatgttctgttactgtaaataacttaccattatatactcgaatgtattcataaataccatcgccaaatacgtatcctctgtcgttgtatgaaacctttgcttcacttggacttacaaactcaccatttaaaaaaattttttccatatattattcctccacgcataatgaataaattgcttctaagtaaatactagttgcgttaaataactgttttttagtgatatattcatttttctgatgcattaaatcttcagaatcactaaacattgcgccaaatgctacacccttgtctaagtttctcgcataagtaccgccacctatagtataaggttcagtcatatcatttgtttgatttctatatgcagtaactaacttttgtacaaaaggatcatttttatcaacataatgtggtggttggactttacctaatttcacttcaaagccatattgttgaatctcatttgcaaaacgatccatagctttttcaaattcaaatccttctgggtagcgtaagttgataccgaaaagacctgcgttttcattatcatatgtaataacaccaatgttagttgtcacgtcacccatgacatctgtatggaatttcattcccatcttttcaccaaaatctgaattaaataagtagcgattactaaatgctacaaacgcttgtgcattattatcaagatttaatgatgctaagaattttagtaagtaaagacccgcattcacaccgatagatggatccataccatgaaccgctttaccttcaactgttaaaactagaatgccactatcaacagtactatcaccttgtaaatgattttgttctaaaaagtactcaaagtcttgaataacatctgtcatattttctttaacaagcactcttgcttctgcatgatcaggtaccatgttgtaacgttcaccagatttaaaagttattaattcataatcaggttcatcttgatcttcagtaagtttattttgaactaaatcaaatgttgtaatgcctttttcaccatgaatacatggaaattctgcatctggtgcaaaacctaatgttggcatttcttctgttttaaaatagcgatccgtacatttccaatcagattcttcatccgtaccaataatcatatgaatacgtttcttccaatccacattcatatcttctaatatcttaattgcataataagcagcaattgttggacctttgtcatcaagtgtacctctagctatgatagcatcttctgttacaaccggctcgaacggattactatcccatccatcaccagcaggaacaacgtcaacatgacataagatacctaatacgtcatttcctttacctgcctcaattcttcctgcaatatgatccacatcatgtgttgtaaatccatctctatgtgcaatttcatacatgtagtctaatgccttacgaggacctggaccaactggtgcgtcttctgatgcttttgcatcatctctcacactttcaattgctaataatccttttaagtcattaatgatttgatcttcgtattgttgaactttttctttccacattcgaaatcgacttccttttttctataagttaaattctattttacatgaaaagatataaaaactacaataagatgtcagaaaataataaaaaggaacaaaacgatgctattgatatgacacaaatcataaatagctgctttgttccttttttaatttatatatttaaaatacacatattcaagagctcgagatataagtcaatgtactaggcacacaatttaatattgacagtaattaaccgaacgaaaatgcgccccggggccccaacacagagaatttcgaaaagaaattctacagacaatgcaagttggcggggccccaacacagaagctggccaatagtcagctttcaataatgtgcaggttggggtaagggccccaacacagaaaatttcgaaaagataaagaaatacgttttctttagatattagtatttcttatgaatgagtttcacgcatgtattcttctttctatatgcatattagctatgactaacgataaagaaccactatataataaatcatagtggttctttatcatttctgtcctactcacatcttattctttatcagataatgcatttttattcttttttaaatcttcttcagtgacgatacgtaaattattatttggtgctgcgccaccttcatcatcaaatttacctttttcaatactttcgtcagtcttattgtcatattcggtaaattttgatttttcttcttcgaaaaatgcttttggattattttttaatctattagcatattctttcggatttgtttttacttctttaattgtttcattagcaattgttcctaattgcgtcgctttatccttagcattatctttatagctttgaggatcttgtttatatttattatattctgctttcagcttgtcacgactatctttacgtgtaacaagtacagctgctacagcgccacctatacctaaaatcgctttaaataaattaccttttgccatatcaatcgtctcccttttatttataatttaatttgtcaaaatcattttcagttaataaacgatattctcctgaatctaaattgctgtccaattctaaatcagcaattttgatacgtcttaaatgtaatacctcattttgaatgctatgaaacattcgtttaacttgatgatattttccttcataaattgttacgtgtgacgtttgattatcaatataagttaatattgcaggcttaaccttgccatcagtcagtgttacaccctctttaaaagcttgaatgtcgtcttcagtgataggatttgctgaaataacttcatattttttagaaacatgtttgtttggactcattaattcatgattaaaatcaccatcattcgttatcaataaaagcccttctgtatctttatcaagacgaccaaccggaaaaatatttagatgttggtattcaggtattaaatcaataacggtttttgaatgatgatcttcagttgctgatatataaccttttggcttatttaacataatatagacattttcaatgtattctattaattctccacgaactgttatcttatcgttttctggttctatatgtgtttttggtgatttaattacttgttcgttgacatttacaaggccttttttaagtaactgtttgacctcattgcgtgtaccgacgcccatatttgctaaaaatttatctattctcatcgtaaaaacctaactctacgtcttaatttttcaggaatttcacctaagaattcgtccgcaagacgcgttttaattgtgattgtaccgtaaattagaatacctactgtaacacctaaaataataatgattaagtaaccaagtttagtaggttctaagaatagatttgcaaggaaaaatactaattctacacctagcatcataataaatgaatacaagaatatttttgcaaaatgaatccaactatagctgaatttaaacttcgcatattttttaagaatatagaaattacatccaattgcaaataataatgcgatactagtacttaaaattgcaccaggtgtatggaataacataattaatggatagtttaacgctaacttgataactacagaagctaaaataacataaactgttaatttctgtttatctataccttgtaacattgatgccgttacacttaatagtgaaattagtattgctacaggcgcataatagaataataagcgactaccatcatggttagggtcatgacctaaaacaattggatcgtaaccatagaaaactgtgaataatggttgtgccaaggccataattccaatactagctggaacagttataaacattaatacaccaatagatgttctaatttgatgatgcatttcatgtaagcgaccttctgcaaatgtttttgtaatataaggaattaaactcactgcaaaaccagcacttaatgatgtcggaatcattacaattttattagttgacatatttagcatattaaagaatatatcttgtaactgtgaaggtataccaactaaagataaagcaccgttatgtgtaaattgatctactaagttaaataatggataattcaaacttacaataacgaacggtatactataagcaataatttctttatacatcttgccatatgacacatctatatctgtgtaatcagattcgaccatacgatcaatattatgcttacgctttctccagtaataccagagtgtgaatataccaataatcgcaccaactgctgctgcaaaagtagcaataccattggctaataaaatagagccatcaaagacatttagtactaaataacttccgattaatatgaaaatcacgcgtgcaatttgctcagttacttctgacactgctgttggccccatagatttataaccttggaatatccctctccatgtcgctaatacaggaataaagataacaaccatactaatgattcttataatccaagtaatatcatcgactgaccaaccgtttttatcatgaatgtttctagctaatgttaattcagaaatataaggtgctaagaaatacagtaccaagaaacctaaaacaccggtaatactcattacaataaaactcgatttataaaatttctgacttactttatatgccccaatagcattatatttcgcaacatatttcgaagctgctaatggtacacctgctgtcgcaactgcaattgcaatattatatggtgcataagcgtatgtgaacggcgccatattttcttgtccaccaattaaatagttgaatggaatgataaaaagtacgcccaataccttggtaattaatatactaatggtaattaaaaaggttccacgcaccatttctttactttcactcattacgaatctccctatctcatgtttattaaagttttgtaaactaaaagctatttctctgtaaaatcatttttcattattatgaatatatcacaaaactttatttcattgtcgtatattcaatgaattatcataacaaaattatcaacgcattgtcattgaatactcgattttgattagaatattacgaaatttcatataaacattatactactatttgagatgaacatcgcataacagtagaaaaatcattcttatcatacacatacatcttcattttttatgaagttcacattataaatatattcaacataattgtcatctcataacacaagagatatagcaaagtttaaaaaagtactataaaatagcaattgaatgtccagtaacaaatttggaggaagcgtatatgtatcaaacaattattatcggaggcggacctagcggcttaatggcggcagtagctgcaagcgaacaaagtagcagtgtgttactcattgaaaaaaagaaaggtctaggtcgtaaactcaaaatatctggtggcggtagatgtaacgtaactaatcgattaccatatgctgaaattattaagaacattcctggaaatgggaaatttttatatagtcccttttcaatttttgataatgaatccatcatagatttttttgagtctaggggtgttaaattaaaagaagaagatcacgggcgtatgtttccagtttccaacaaagcacaagacgtggttgatacattagtgacaactatcgaacgccaacatgtaacgattaaagaagaagaagctgttagtagaatcgaagttaatacagaccaaactttcactgtacatactcaaaataatagttatgaaagccattcgctagtgattgctacaggtggtacaagtgtccctcaaactggttcaactggtgatggttataagttcgcacaagatttaggtcataccattactgagttattcccgaccgaagttccaattacatcagctgaacctttcatcaaatccaatcgtctaaaaggtttaagtttaaaagatgttgaattgtcagtacttaagaaaaatggtaaaaaacgcatcagtcatcaaatggatatgttatttactcattttggtatcagtggtccagctgcattaagatgtagtcagtttgtttataaagaacaaaaaaatcaaaagacacagcacatttctatggcaatcgatgcatttcctgaattaaaccatgaacaattaaaacaacacatcacatcattattatcggacacaccagataaaatcattaaaaacagtttgcatggtctaattgaagagcgctacttactgttcatgctggaacaagctggaatcgatgaaaataccacatcacatcacttatcaaatcaacaattgaacgacttagtaaatatgtttaaagggtttgtatttaaggtaaacgggacattacctatagataaggcatttgtcacaggtggtggtgtgtcacttaaagaaattcaacctaaaacaatgatgtctaaattagttccgggattatttttatgtggtgaagtattagatatacatggttatactggtggttataatattacaagtgcactcgtaacaggacatgtcgctggattatatgccggtcattactcacatacatcaatggaataatagtataaaatttggttcgattctctttagtagatcaactttttcattcaattaaaaatgaccttaatataactgagtcactaaaaagtgtcgttatattaaggtcatttcgttaattatgattctttttcgtttttagtacgtcttctagctaacaaagccgcacctgtaatcagtgcaaattctttcaatggtaaatccattccttcagaacctgtatttggaagttctttttcaactttgcgcgattcatgtgtctcttcttttttaataggcgtacaaacttttggagctggctgaatttcttttggtgatactttcgtcgcttcagctggtaatttaattgctaaaatttcatcaacaatgaattgcgtgtgttgtttgatgtcatttaatgtcgcatcttcatcaatcattctattgccatctgcaacatattgatcaattaatacttttactttagctaattgttctggtgttgcgatcgctttgaatttcgcatatgtttgttgagcaatgttatcaattcgcagtaagctattttctttttcagtaattactgcttctatatcgcttaatgcaacattaaatcgttttaaaactgcatcaacatcagcattagtgcgtgctgtttttaattcttcatccatttgtaattttaaagcagttatagcttttaatgcatcagccttattacgattacttacttttcgataattttgcactaaagcagtgacgcgtgcaagatcatcattaatcgttttttcagcatctggctttttaataggatgtacatctaaatcatgtattgtttgtagatttaatgatgctgttttatcaacttgtgcattgctacgatcttgatcaatttgtccaatagcagtgtcataaatattttgtaactgtgctaatatactatttctttcttctaccgttgcttgaatattcgcttcaattgcttgttttttatcgttgaataatgttgtcaattgttctcgagcagacgcctttctgttaataacaggttcgatttcacgaatttcgtttttctcatcatgcaataaatatgccacatcagcattagtcactgcactagcaatttgttgtttagctttaattaactctttttcaacttgtgctattgcaatattttgttcttcatctgtcgcttcgttatttgctttaattaaattaattttatttgtagcgatattttgaatttgttgtaatgctgttgctttaactgttgtcgctggtttaatttttgaaataatattttgagcatctatactatcttgattaacttgggcagtcttatctgcatgattgatctgatcaatagcctgattaagtgcttgttctactaaatgtttagcagctagtctttcttcttcagttgataaatcgctttgatcgattagtgcattttgagcttcggcttttacaccaacagattgacgcgctgctggtttaacttgaactttaggtaaaatcactttgatgttgtcgttgccatcagtctcagttcgatccacttctgcattcgttttgttttgtgcaatgtcatttttaattgtatttacaattttatttaaagtatcaatagcaacatctctttcatcttgagtagtatccaacgtatttcggattgcatcgagttgatttttattattttcttcaatgctatcaagcgcagctcgtttacgtcttactttaggttttatttgctcaattgccttgattgtttgatttctaacatcagtaacagcagcatcttgatttgtattttctatttcttgttgcgcttgtttgagtgtgtcgctaattaattgattcgcttcatctaattcatcaactgttgcatgtggtgtatcttttattgattctacttgattttctgcagttgcttttattgcttgttgtgcttcaggcttaattacaatatgaggttgtacaccttttagtgtagcaatgccatttgtttcaacacgtttcacatcattattcgttactgcttgattgatgttttgtaatgcaagtttttcattattcgctaattgatttaaagcaacttgtttttcttcatcagtcgcatgttcagcttgctctatttcttgctttttagcctcatattgttgctttactgcatctctagcagctgctctaacaatatgttcaggcgctactaaagcaatgctatcaagcgcttgacttgttgtatcatcaacttgttgatttgttctattattcgtaatatctgtcatggcttgatttacaaattcattgattttatctagtgctacttgtctttcttctgctgttgcttctttatcctgattaatcttagcacgtaattcattcgctttttgattgattttttcacgtgcagctggtttaacttttgtttcaggttgaataattttaatcgctgatacaccatttgttgctgcttgattcacctgactattcgtttgagcttggtcaatagctgcaagtgctttttctttttctttagctaatgcttgtgaagcaacttctttctcattatctgttgaatcaagactattatcaatttgctgttgcttttctttaacagctttttcaatatctgcaattgccgttggtttaattactacttcagcttcaacattatctatagcatttaccgcttgatttgtagttgtgtctacctgatcatttgtttggttttgattaatttgattaattgcttgatctttaagttgattgatttgattaacagcagcctgcttttcttcgtcagttgcattaggtgtttgtttaaccgcttcaatacgcttcgccacttcagcagtgattttatctcgcgctgcttgtttttttactacatcaacttgaacagcatcgatattattctctgctactgtcgcagcttggtctacttctgcatttgtgttagcttgtttaatactttcaatagcttgttgtctgtcttgatttaaagtattgatcgcagcatttttctcatcattcgttgcatctggtgtagcattgatttcagctaatttagcattataatgctgattgatttgtgctaatgctgcaggttttttaacaatatttggctgaatcgcattaattgcttttgtacctaattgttgcgcttgatctacttccgcatttgtatcagcttgatttatattattaattgccgttgctaactcttgatccacttgatttaaagccacttgcttttcttcagttgttgcatttgtgttttgattaatttcttgctttttagcagttgctaaatcatttaatacacctgtagcagtttgtttcttcgttacatgcggttgaactgcgccgatttgattgactgcatcgtctctaatactattgaccatcgcagtagtagacgtcacaccaatatcagttaatgctctatttttaagtgtattgacacgatttatcgcttcttgtttctcttctcgagtcgcgccaggtgtagcattgatatttgttatcgcctctcgagctttatcatttacagcattgcgagcatccgttttaacttgtgttgccggttgaatcacaactatattttgtgtgccctgatcttttgcttgtgcaacttcttgattcgtatctgctgcattaatattttgcttcgctgtggctacagcttgatcaagtaattgttgtgctgcttgttgttcttcgagcgtcgcatcattattattaaatatcgtattatgttgcgtttccgcacttttatcgatggcattttttgcatctgtttttacttttgtagctggtgtaattgcttgtattccttgaatcgcatttgtctttacttgttcaacatcagcattggtattagcgtttaaaatgtttgtgtttgctgcagttacagcagcattcactttgtcaattgctgcttgtctttcttcttgagtcgcatcaggattagcattgatttctgcgatatgttgttgtgcatcatgtgatacagcatcccttgcagcttgcttaacaacagttacaggagcaattggattaatggcatttagaccatctcctttggcgttatcaacatcagcatttgttgttgcttgattgatttgttctaaagcatggttggttgcttgagttaattcgttcaatgctgcatttttctcttcctgagttgcttctctattactatttatttgttgtcttttcgttgctgttgcttggttaattgcatctcttgcagcttgtttatgtgtcacttgaggaacaactgctccaatagtattgatgccattatttttagctatttcaacgtcagcatttgtagtagcattcgtaacattatcaatagcatctgtttcatccgtagctaattgatttagtgcatcttgaatctcgtcttcagtagcatctggtgttgcattgataatttccctttgtttcgttgctttatcacgtattgcttttttagcatttggtttaacaaccggtgttgcagtatccccacttaaggtctgtataccttgatctttgattctagtaacgccatcatcagtcgtttggtcaccaatattaccaattatttcatttttatgttcctcgataacttgtattgctgcttgtttttcttcatctgtcaattcatcattttgattaactaaatcttccatttggtcaacttttttattaactgcattttcagcatcaacacttcgaattaacgtatgttgcatttgattagttaatgaatcaatatctacttgagaaactcttttatttaatggtacattgttacgattttcatctaaaatcgtttgtgcacgtcttttaagatcattaaagatatctaatgatgcaaatgtataatcagcttgttgaatgcgtctatcaacctcggcttgtaatgcatctttattcatgatgatatcgattgtatatggatttgtacttacagtatgactttcagcaggtgaattaataaaatcttgtgtatatgttttatatgttaatgtatcattaaatgttactgttcttggtgtcggtacattattaacacgcaacttatactttaaatccaatattttatcaggcattaatcgtgccggcgagttacctgaacctccaccagtacttttaattgttatcactcgattcgccgcatcatacgtcacattaaaatcattcatatcaacacctgaattactgcttggaaaatctttagtcaatgagttattaacatattctaccccttcaggtaattgaactttatatacaaaatcatctgtattaaatgaagcaccgaagttaccattattctttaatgaagttgtgactgtaaattctttattattagtagctgtgggttccattgttcgtctttcaacatagacatgcgaaccagaatgtagaccaattgagtcaacaaagtcatagtatttataaccgtctcttagttgataaatgccacgcgcatctgttattgcatcatttttaggtacaaattgaatttttaagtgactaacattttcaggcactttaaacaaacgccaaatcggaccataagctactgatttttctgcaataacagtatcattatcagcatttttaattattaaatttgtcacaccttgatagttttttgtagtcatcgtattaaattcgaaaattaattcagaatttggatttactgttaaagatttttcaattccattaaaatcaccatgatcatttgtatcatttcccttaatacgacctaatgcaattacatttccttgtgcttgatagttcttagcatctcctgaatcaaacatacttgttctaaccatcgcatgactaaacacacctactttaccaccattgataagtgtaaagcctggtaaattatcaacaactgttactgatggtacagaacggttggtacttggtctaataccattgtcatcaaaagacagcacttcgttaggtgcattttgtcctgcattattggcattaggatcagttgtcggcgtgtatggcgctgtaattgctactggtgcaccaccgtttcctgccgctgcagccgctggatctgctggagttgcattaggatctgccggtgccgcacgtctacttctctttttcggtctattagatgcttgttcagcaattgcaactagctctggtttatctgaagaatgacgaacatcttcttgaatttcctttaaagttagatgtcctcctgaaccattttcatttgttttattaggtacatttaatgtggtattattcgacactacatccttattattagcgtttgacactgtctcagttgctgttgtattgccatctgtatgattattgttttgtgctgaaggcgtacttgattgcactgatgttggcgtagcttgatttgctatactaccattattatgattaaccaatgcttgattcgttgattgattagttgttgcagattgattaggtgtattctgagcactatttgctaaacctctattattagcaacatttgtatcttgtgaatttacaggtgtggcttgattagtatcgctttgtacattattatccgtagttaaggcttgtgcaccatttgggtttgaaagtaataaaactgttccgattaaagtagagaatatgcctactttatacttcctaatactatatttatttttctttaacaaattcatttcattttcctcctggttgtctgttctctgctgtgttgtttagaattatgctaaaaatatacgctctctcatattatgtttataactatattattttgtacaatattttaagttcactcaattttatcatcatcattttataaaataaagttttattttattacaatttagtttccgttttgtaattaaaatcttaataaaacataacaagaacgctttagattgttttgtaacagaaagtaattcataccaaaaaacaccaagcaaccgaaacgttacttggtgtcattacaaatgtaatattattttaaattatgtcactactttaaatactttttatttccaaaccttcatcgccccatgcgtgcatgccgccttcgacatttacggcatcaatgccatttgcctctaaatattctacaactttagcgcttcgaactccaccagcacatacaatataatatatttcatttttattaaatgaatttaaattatccggaatggtatccattggaatcaactttgcattaggaatatatcccattgctgtttcttcgtcagtacgaacatcaacaatttgaactggtttagattcaaaaagtttgttttttaattcatctgtagtaattgacttcatttcaaagtcctccttaaaacattatttagctacaatattgactaatttttgaggaacagcgatgactttcatgatgtctttaccttcaatactcgctttaacattgtcattagataaggcaatttcttgcatttcttcttttgatgtatctttagcaattttaattttagctctcaatttaccatttacttgaacaacgatttctacttcatcatctacaagtagtgcttcgtcataagttggccaaggttggtacgtaatagactcttcatgtcctaattttgaccataattcttcaccgatatgtggtgcaataggtgctaacattttaacgaagccttcaatgtaaggtttataaacttcatcaactttataacactcattaataaataccattaattgactaatagcagtattaaatcctaatgtttcaaagtcttctgttacctttttaacagtttggttataaactttatctaaagatttattatttgtagttacaatttttgaactcaatgttccatcttcatttaccattaaacgccatacgcgatctaagaatcgacgagacccatctaatcctttttcactccatgcaattgcagcatctaaaggtcccataaacatttcgtaaagacgtaaagtatctgcaccatgagactgtactatatcatcaggattgattacatttcctttagatttactcatcttctcattaccttctcctaaaatcataccttggttaaataatttttggaaaggttctttagtaggtacgatacccaaatcataaaggactttatgccaaaatcttgcatataataagtgaagaaccgcatgttctactccaccgatatataaatcaacaggtaaccaatgttttaatttttcaggatctgctaacatattttcatttttaggatcgatgtaacgtaaataataccaacaactacctgcccattgtggcattgtatttgtttcacgacgtcctttcatacctgttttttcatctacaacatttacaaatgaatcaatattagctagtggagactcaccagtccctgatggcttgatttcatctgtttcaggtaacaacaatggtagctcttcttcaggaacagttgtcattgttccatcttcccaatgaatgacaggaattggttcgccccaataacgctgacgactgaataaccaatctcttaatttgtaattaactttcttttcgccagcacctttttgctctaataattgaatagctttagtaattgccgcttcattttctaaaccatcaagttcaccagaattaatatgtttaccttcaccagtgtatgctgcttcttcaacatttccaccttcgatgacttcaatgattggcaaatcaaactttttagcaaattcataatctctgtcatcatgcgctggtactgccataattgctccagtaccatatgttgataatacataatcagcaatccaaatttgtactttttcaccagataaaggattaattgcatatgcaccagtaaacacacctgatttatcttttgctaaatctgtacgttctaaatctgactttttagaagcttctgtttgataagcttttactttttctttatattcatcagttgtaattgaattaactaatgcatgttcaggacttaagactaagaatgatgcaccatagatagtgtctggtctagtcgtaaatacttctacttttccttccgtattatctacatcaaatgaaactttggccccttcagaacgtccaatccaattgcgctgcatatcttttaaagactcaggccaatctaaatcatctaaatctgctaataattgatctgcatattctgtgattttaagtacccattgtttcatcggcttacgataaactggatgtccaccacgttcagagacaccatcaatcacttcttcgttagataaaacagtgcctaatgctggacaccagttaactgcaacttcatcaacgtatgctaaacctttgttatataactgtatgaaaatccactgtgtccatttatagtattctggatctgttgtattaacttcacgatcccaatcataactgaaccctaattctttaatttgtcgtttaaaagtttggatatttttctttgtaaattcacgtgggtcgttgccagtgtctaaagcatattgctctgctggtaatccgaatgcatcccaccccatcggatgtaatacattataaccttgcatccttttatatcttgaaatgatatctgttgctgtatagccctcaggatgtccaacatgtaaaccagcacctgatggatatggaaacatgtctaaagcataaaatttcttttgacctaagttatcatttgttttaaatgttttattttcgtcccaatagtcttgccatttcttttcaatttgattgtggttgtaattcaacacatttcctcctattcaataaaaaagacacctctaactattctatttacatagggacgacatttgccgcgttaccaccctatttcacaaaaattgtgcactcattttaatagtaagagatgtcattcattcaatttaaaattaatacgatttacatttagtccttaacactagctctcagcatcactagctttctgtagaaaagctccaaacgaaattaaattatacaaattaatattatgttataacgacatttatttcaagtctataacgttaattctatttactcattatgcatctatttttttaggttgcgtattattctccttgaaaaccattaataatattaatgcaaatacaagtagtagcatcataccgataaacatcatgcgcatattaaacgcatcaactaatacaccaccaagaaatggaccaaatgcttttcctactgtagcagctgaattcacaaaaccttggtactgtccttgcttaccatctggcgctaactgattggctatagttggaactgctggccatacaaacatttctccaaaagttaaaataatcataccgacaacaaatattgtaaagttttcggcaaaactcgtgacaaagaacgacaacataaaaatgatgatgccgacaaacatttgcttctttaagtttccttttaacagatagagaaccggtttaattaatggttgtgctactaaaatcattattccgttaattgtccataaaacactatattgtgccattgaaatattaatagattgtgtaaatgatgcgattgtagactcccattgaatatacgcaacccaacaaattgcaaacattgcacaaattagtactaatgaaataaatcttgctttattctttttaccagtaatatctaaatgagttggatatttaactttcgcattaatttcaatattaaattgcgttaccgcgacaagcgcaaacacaacatacataataagattggctaaaaagatatagttaaagctaaattctgcgacaaagccgcccattgcagcaccgacagccacaccaatattttgcgctaagtatatcgcattaaacgtttgtcttccgccattcggccacactgctccagccatagcgtatatcgcaggaataatcattccgccaccaaagcctaacattacaagccatacagcataccaaggccacccgtgaaagaaattaagtagcgttgtactacaaagacaagtgaaagttccaattaaaatcgtcttgtatccacctaatttatcaaatagtgaaccacctaataagtttccaataaccatgccaaatgaatttatcattagcactaaaccagcaacagttaaactttttccaagttcttgtttcatataaattgtatttaaaggccacaaaaaactggaaccagtaatatttaacgccatgccaattactagccaccagactgatttaggtatattcatatttcatagttcctctctcttttttgtcaaactataataaacactataacattaaaatatgttaaaatctgtacttagaactctttttttatagaaaggaaaatgacatatgggcaatcatttccaatacgcttttgaaaacaaacgttatcacacatggaattaccatttaaaaaataaatttggacaaaaaatatttaaagttgcattggatggcgggtttgactgtcctaaccgcgatggcactgtagcacatggtggatgtacattttgttctgctgcaggtagcggggactttgcaggtaatcgtgcagattcaatcgcagtacaatttaaagaaattaaggaaaagatgcatgagaaatggcacgaaggaaaatatattgcttattttcaggcatttacaaatacacatgcaccagttgaagtattaaaagaaaaattcgaacctgtacttaaagaaccgggtgttgtaggattatctattggtacgcgtcctgactgtctaccagacgatgttgtcgaatatttagcagatttgaatcaacgaacatacttatgggttgaattaggactacaaacaatccatcagtcaacatctgatttaatcaatcgtgcccatgatatgaaaacttattatgatggtgtggcaaaattacgtaagcataatatcaatgtatgtacacacatcattaatggcttacctggcgaagactatgacatgatgatggctactgccaaagaagttgcacaaatggatgtacaaggtattaaaattcatttacttcatttgttaaaaggtacaccgatggtaaaacaatacgataaaggtttattaacttttatgactcaagaagagtacacaaacctagttgtggaccaattagaagtgattccccctgaaatgatcgttcaccgaattaccggtgatggtccaatagatatcatggtaggtccaatgtggagtgttaataaatgggaagtattaaatggcatcgatgctgaattagcacgtagaaattcttatcaaggcttgcgttacaagtctaaggtgaagcaatgaaattagaacgtatactccctttttcaaaaacacttattaaacaacatataacaccagaaagtattgttgtggacgcaacttgcggtaacggcaatgacactttatttttagccgaacaagtaccagaaggacatgtttatggtttcgacattcaagatttagctttggaaaatacacgtgataaagttaaggatttcaatcatgtttctttaataaaagatggacatgaaaatattgaacatcatataaatgatgcacataaaggtcatattgatgcagccatctttaacctaggttatttgcctaaaggtgataaatctatcgtgacaaagcctgacacgacaatccaagctattaattcattgctatcattaatgtcaattgaaggtattattgtacttgttatatatcatggtcatagcgaaggacaaattgagaagcatgcattgcttgattacttgagtactttggatcaaaagcatgcgcaagttttgcaatatcaatttttaaaccaacgtaatcatgctccattcatttgtgccatagaaaaaatttcttaagcatttgctgcgctatactatttataatttaggattgagtagtcaacatttgaaaaattaataccaacaacaacaaaaagaggttttcaacttaatgaaaacctctttttatgctattaaacttacacagcaataattgcgtttaaactattttgcattgctgttgctctacttgcaatggcatcactgatgaaattcaacaactctactttctcttgttgtaacttttcattgaaatgaataataactgttctttcatcgtcaacaggacgctctttgtaaatccattctaattcaactaaattattatacgttctcgtacgcttatacggtttaacttcaacaaatctgtccatttctttaagcgtcatagaacctttttgccataaagttagtaaaattaaaatttcttctctagacattttgtattcgctttcaatctcgctgaaaattgagttaatgtcacccaaaagtgtttctaattgcaaaatcccaaatacagtgtcgttatttacttttttcatgctaaacatctcccaattaataatcacatatttagctaccatacaagtattaacaaacatcccaacaatcccaaaacttgtatgtgctaacttatgcataaaactacaagtgtaaataaacttgctttctattcaattgtcaaagttgaataaaattaaataagtataaaaaccaataatcaatagagttaatatttagaaataagataatagtacataaaacaaatcactctattacatattaattttataatttatatacaaagaaaatatatcaatattaccattaaattgcaacaattctacatatatttcttcaaaaaagatacgcattgaatttttattacatataactctcatgaaaattgattaaactaaattaattagttagccttaaatttaacaaattaaatcaaaccgaatgaggctaaattggttatttttcaagatatgatttgtataaatcaaaacatttcttacaaatcaaatgtgtataaaatgtgatatacattctcaaccttaaaaaagtaaaaaaaagatgagcatctactgtctcatctttttagaatattaaatttctacaatttcgtcatcttcaacaataaagcccattgtattgacgctgttatttaagaaagtcagaatataacgcattacttcatcacgttctggctcattgtgaacctcgtggtaaaaaccttgccaagctttaaaatataattcaggtgtttgatatttttctttaaactcatcaattgccctagtatcaacaattaaatccttcgttccatacattaatagcgttggcattggttgaatgtcatgaatatgagccatcgtatctttcatcgtctcattaattgtattataccaatgatacgttgctttttttaacattaaaccatcgttaactgtttcttcaacaatttctaaattacgtgttaaatcttttggttctacaccaacattaaaacgtgtgtcttttgaaattttacctatatttgaaacaagtttatctttacgattttttccattcttttgaagttctagcataggagaaattaacatcatcccctcgattggcaattctactttttcaagtaaatttaataaaatcaaaccgccaagtcctacccctaatacataagtaggaattttatattcattagctatctttaaccaatctagcaaactttcgtgatacgtttgaaagttttcaatttgtcctttattagctcttgaagtttgaccttgaccaggcaaatctcccataatcacatgatagccatttcttcttaacatcgtaataacatatgcatatcttcccgtatgttctaatatattatgagcaataacaacgacgcctttcgcatcattttcagcttcccacttccacattattatactgcccctttttcattaatcttcaataacataattatagcaaattcactatgtagatttctatttatagtattattgttgtccatattattatatataaatgaaatcaacatcaataatagtgtaattatacataattatttttgattgttttttttgaaaacgctttctcgaatatttttttcatgctaaacttattgtaaacacaagggtttggaggagtagcaatggcactattaaagaatttttttatcggattatctaataatagttttttaaacaacgcagcaaaaaaagtgggcccacgtttgggcgccaataaagtcgttgccggaaatacaattccagagttaattaatacaatcgaatacttaaatgacaagaatatcgctgttacggtagacaatttaggggaatttgtcggtacagttgaagaaagtaatcatgctaaagaacaaattttaacaattatggacgcgcttcatcaacatggcgtaaaggcacatatgtctgttaaattgagtcagttaggtgcagaattcgacttagaattagcttaccaaaatttaagagaaattttacttaaagcaaatacttacaacaatatgcatataaatattgatactgaaaaatatgctagcctgcaacaaattgttcaagttttagatcgcttaaaaggcgaatttagaaatgttggtactgtaattcaagcatatttatacgatagccacaaattagttgataagtaccaagatttacgattacgtttggttaaaggtgcatataaagaaaacgaatcaattgcatttcaatctaaggaagacgtagatgcaaattacatcaaaataattgaacaacgtttgttaaacgcacgcaatttcacttcaattgcaacacatgaccatcgcatcattaatcatgtaaaacaatttatgaaagaaaatcacattgaaaaagatcgtatggaattccaaatgctctatggttttagatcagagttagcagaagaaatcgcaaatgaaggctataatttcactatttatgtaccttatggcgatgattggtttgcgtattttatgagaagattagcagaacgcccacaaaacctatctcttgctgtaaaagaatttgtgaaacctgctggcttaaaacgtgttggcataattgcagctttaggagctacagttatgttaggtttaagtacaattaaaaaattatgccgtaaatagagcatggcataaacaataatttaggagtctggaacaataatcaatgttctaggctcctaaatgttatattggcagttctgaaacatttataaatctttgattatgaactcacaacagcgctctatgcttttatagattttaataaattagccatttcaattgcacttactgctgcttcggcacctttattaccagctttcgtacctgctctttccacagcttgttcaatactttcagtcgttaaaataccaaatatgactggtacattagtttgatcatttactttagaaacacctttcgcgacttcattacaaacataatcataatgagacgtagcaccgcgaattacgcatcctaatgtaattattgcatcataatttcctgatgaggctaattttttagctactaaaggaatttcaaacgcaccaggaacaaatgctacatcaatattgtcttcattaacatcatgtcgaatcaaagtatcttttgcaccttcaagtaatcttccagtgataaaatcattaaatcgactaactacgattgcaactttcaaatcttttccaattaatttaccttcaaaattcatgttaaagtcctcctatattaaatgacccatttttatttttttcgttaccatataatcatgattatgtaccgtttctggtacgataacttcaattctttctgcaatatcaatgccatattgttttaatccctcaaatttacttggattattacttaataaattgatatgttcgatgttaaaatattttaaaatctgtgcagcaatatgataatctcgtaaatcttcatcaaaacctaatgctaaatttgcagttactgtatcatatccttgctcaattaattcatatgcgcgtaatttgtttaacaatcctatgccacgaccttcttgaggtagataaataatcatgccaccatgttcattgatatacttcatagacgattcaagttgagcaccacaatcacaacgttgactatggaaaatatcgcctgtaaggcacgcagaatgtaagcgtacattttcatgttgtcgaattgcaccttttgtcagtacaactatctcttcatctgtgtatgtcgctttaaaaccatacatatcaaatgttccgaaatctgtaggcattttcacttttgccttaaattcaatttctggttctaattttttacgatattcaattaaatcatcaatcgtaatcatctttaattgatgtttttctttaaaattttgtaaatcttgtcctttcgccatcgtgccgtcatcattcataatctcacaaatgacaccagcgggcttggcaccagtaagtttagctaaatcaacagccgcttctgtgtgtccatttctagctaatacgcctttatcttgtgctactaatggaaataaatgaccaggacgattaaaatctttagcttcactactaggatcaatgagctttttggcagtcaatgtacgttcataagcactaattcctgttgttgtatctacatgatcaatactcactgtaaattgcgtaccaaagatgtcggagttatcatcaaccatttgtaccaaatccaaacgttgtgcaatatctttagacactggtgcgcatattaatccccttgcttctttcgccataaaattaatggtattatcgttcatccattcagtaaccgctactaaatcaccttcattttcacgattctcatcatctactacaataattgtttctccattttttaaagccattaaagcactgtcaatattatcgaattgcatgctacccctcctaaaaaccaaatgctcttaatttatctacagataattggtctttatctttatttaaaatattttcaacatatttaaacaaaacgtctgtttctaaatgtactttatctcctaattttttggatgataaaatcgttgaacgcctcgtttctggaataagatgaatgtcaaaactgttatcatgcttatcaaataccgttagacttacaccatccacagtaatagacccttgcttaactaactgattattaatatgttggctacattgaatcgtaataattttggcattggctgtttcatttatttttgaaactgttcctagttcatctacatgaccgaggacaaaatgtccaccaaacctaccgttaccactcatggcacgctctaaatttacttctgattgtcgcttaacatctgctaaataggttttattttcagtgcttttaattacttgaacagtaaaagatgtctgatcaaaatcaatcactgttaaacatgcaccattaacactgatggaatcaccaatatgcatatctgccgtaatcttatgtgcttcgatttcaatcgtcctgactgattgacgaatttgaacacttttaacgacacctatttcttcaacgatgccagtaaacatgcatcatcacttctttcgtaaagttaatttaacattttgatttaataactcggaatgaacaatttcaaattggttcgcatctggtatctcaatcacatcatttgtttgataaaattgataatttccagatccgccaattaatttcggggcataatagagaataaattcatctatataattagattggagaaattctgaagtagtggttggacctgcctcgactagcaaagttccaactcctcttttatataaattgtgaagaattgttgttaaatcacaagacttcaagtaaataatttcaatatgtgtttgattgcttgttaaatttggattttcagtatatatccaaattggtgttgattcatcttgataaatttgctgattaaaatgaatattcccagacttagacaatattacttttatagggttttttccatcttgaatacgtgtagtatattgtggatcatctaattcaactgtacgtcttccagttaacactgcgtcgtgtcgatgtcttaacttatagacatcttgtttaacctctttgttagtaatccattgactttgtccattatcattcgcttgtttaccatctaaacttgcagatactttcactgtaatttgtggcagttgctttgcttttgctttaaaaaagtcttggtataattgtgatgcccgttcatcatcaacgcattcaacctcaataccgtgagcccgtaacgtctcatcaccatgtgtgtctaacgaattgtcttttgttgcgtatactacttttgctatcttacaatcaataattttgttaacacagggtggtgttgaaccaaaatgactacatggctctaacgtaatataaatcgtcgcaccttcagcattttgttgtgccatatcaagtgcttgaacctccgcatgcttgtcaccttttctcaagtgtgcaccaataccaacaatcctaccttcattaactacaacagcgccaacgggtggattaacacctgtttgaccttgtaccatatttgcaagttgaatcgcataatccataaattgactcaaatgatcacctctataaacaaaaatcctcacatcatgaattaagatgcaaggagaaaaatttatcgttaaataagcctatttgtacacatttttacaaatacgctacattatctttgtcgataattaacattctttctcccatccagactttaactgtcggctctagaatctcactagatcagccactaatatgaaacatattagcaggtcgcaggctttatttactgccggttgggaatttcaccctgccccgaaagaattatatatgaaattgttatagattatttgagtacgtagtatgtcaactacatttaaaatgatactatatgttttctgaaaaaacaattaatgacggttttaatttaatataatctgagtactataggcatctcattgatatgattcttactaacagacattaaaatcaaaccttcaattcgtctctatagagcgttctctttattatcttctagttacaaattattgattgtaactgcgctgttgttgctcattcgattctaaagcatcatataattgagatactgtatgcgcaacttgttctactatcattttcacaccatttcgtagtttattaacaccgtttgtcatttgacctatcgcaatcatatttgttaatgttccaaaccttggactaataacttgattggtttccggtatgatttgtatgcctcccattggatgtgcttgtacaatttgtctattttcaagatttttaattaattgatcatcttgatccaattcatttaaatgactttttgcacctgtcgcgttaatgacaacattatacatgtctactgattcttggtttttgtatgaaaaataatacaacttgccatcatgtttcacatcttctaaatcttttttcaaaattaaagacttattttctattaattcaataattagttcagcagttcttggaggcattggatttgaatttaattgaatcatctttgagtatttttgattaaattgatgttgatcttcaatacttaagctattccatatccaatttaaattctctttcaaatgttcaatcatactttggaaaatgcccatttctgttggacgcgctaaatcatacttcaaatctgcaatatgatttcctgtacgtctatgtactaattttttaaaatcaatgtcatattcagcacattcttttaaaaataaagaaactatagtatcaagcggtgcattgccgaaatgatgttttttaatgtcatttaatttgtctttagttaagtacttgaatgtcacgtctatcattgtacctcttacacttggtaaatgagcagaacgactcgtcatagtaattggtaatttcggatgatgagcagcaacataacggacaacatctaaactggcaaggcctgtaccaataatcgcaatatcgtccagttcatttacttcgtctaacgtattatatgttggataaggcgtagcgatatatccttttttaccctttaagttatatggatcatggtaggcaaatgtaccacatgttaaaaatacataatcgtacgcttgccatgattgttctgaatttgtagtacatatgtaataagttaaattcgtttcatcgatattagaatttgtataaatctcttgaactttattataattagttgatatatttggatattttttcgtgaacatagataaataagatttcatataatgtccgaatacaaatctcggtaaatatgcaggttcatcaaaattaaaatcagtttgttgtttataccacttccaaaattcagtctcatcatctaaatttaaactcatctttttcgaaggcatattaattagcagctcagaactatcattttgaaatggtacgccctgtcccatatttactttatcatcgtataaatctatatctaattgattaaacttcgggtgcttaactaactctctcaatacacttacaccagcagttcccatgcctattattgctacacgcatatatcatccatccttttgtaattcaaaatattatatttaaactattacctataattatagcaatttggtatttccaataaaatttattaaggtaagctattatttcactttcacaaccattaaaccatttaaaacttttcatttaatatcaaccttagtgtttgtgttaaaatatttttaacgaggtgaattaaattgaaatttatagcaaagatattaatctcattagtaattctatttatgatttttagtcgtaaaaacaaagcttcttaatcaatacccttgattacaaaataaattcaactaaggtgattggccatacactcaagatatggctaatcacctttttcaatgcaaaacaaagagtatattttgcaaaatcaatatctataatttatctttaatacccttttaatactaaaaccaaattcaaattacatagtcatatcgtgtaatataccaaaggaacatagacattcatctatatagatgataatctatttaacgtctaggaggtatgttatgacgtataaagaactagcaacatttttaaaagttttatcagattcaagcagattagaaatactagatttactttcttgtggagagttatgcgcttgtgatttgttagcacattttcaattctctcaacccacacttagctatcatttgaaagcattagtaaaaaccaacttagttacgacacgaaaaatcggaaataaacatttataccagcttaatcataatatttttgagtccgtaattaataacttgtctaaggttcatacctctaaccaacgatgtttttgtcataaccttaagactggtgaatgctaatgatgacaactttagcgacactcatttttctagtaactttattatttgtattatggcaacctaaaggcctagatattggcattaccgcattaactggtgcctttattgctgttattactggtgttgtaagtttttccgatgttttcgaagtaacaggtattgtttggaatgctactttgacttttgtctcagtcattcttatttcattaatattagataaagttggattattcgaatggtcagctattcacatgcttcatgcttcaaaaggaaatggtttaaaaatgttcgtttatatcatattattgggtgccattgttgctgcatttttcgcaaatgatggcgcagcgttaatcttaacgcctattgtattagcgatggttaaaaatataggttttagtaagcgggccatattcccttttattattgcgagtggttttatagctgacacaacttctttacctttgatcgtgagcaatctagtgaatattatatctgctgattattttcatgtaggattcgttcgatattttagtagaatgattatacctaatttattctcgcttttagcaagtattatagtattgtggttatattttagaaaggcgatacctaaaacgtttgatgataataatataaagcatcctaaagatgccattaatgatttaaagctatttaaaatttcatggattgttctagttatattacttttcggctatctaatcagtgaatttactaaaattccggtatcaattttcactggaatcattgcttttatttttctaatgttggctcgtaaatcaaatgctgtaaatattaagcaagtcattaagggcgcaccttggaatatagtattattttcaattggtatgtatatcgtcgtattcggcttaagaaatgctggcattactttaatattggctaaaatattagaatatatttccaattacggtctatttagcaccattttgggaatgggcttcatttcagcgtttttatcatcaataatgaataatatgcctacagttttaatagatgcgattgctattggtcaatcaaatgtccatggcatgttaaaagaaggcctaatttatgcgaatgttatcggttctgatttaggtccaaaaattacaccgataggctctttagctacattactgtggttacacgtcttaacacaaaaagatgttaagatttcttggggcacatactttaaaactggtatcatcattacaattccagtactatttataaccctcatagggttgtatctaacacttatcatattttaagaaataaaaagacgctttctatttattgcgatagaaagcgtctttttatacttgagcaagttatatcataacttaactctatcaaattacttattcaaatgtttactgtcatctttatacacaaagtatttgaagtattttccttcagtcttcatattcttataaaagtcagcgataattgttgcattactttctgcccacttaatatcagtagcatattgatgttctcctggattttttggattccatctcatactatacaatgtattttgatctgtgcttgataagaagtgcttatgaatgaaatcagcaccgcctgaaatagctttttcaggtgtatcccaaccatgctttttagcatattctgcacctgttttaattgggtctttatcaagggctcctactccatagaaattgtagtattttttgccatcaatttcgactccattagctaattcacttttaactgcgccagtttctaataatgcatgtgaaattaaataaacttcgttaacgtgcttatctttagcagcttttaagaaatcatccgtatgtttcaataacgttggtctatctactaacatacgtttaattctatttttatcaatcccttgatactttgataaatctaaaaattgatatttttgcttttcattatcgataaaagtaccgctatccattgcacttttaatttcagttgcagatgcatctctccatgcatcattctttttatttgatacctgttgactcgtataattatttatttgtttctttgctgcatcgtttaatgtaacatttaacttttcaatcttaatgtcggatttaacatgtttgaaaaatatctgatcggatatcattgagaaaaataaaaatgagacaacagcaaatatgacaacaagtcctattattccaaaaatagaacctttcttgtgtttattcatatccacacctcttaggtcattgttgttatacattcagtttgactacgataataaagtttaacattattaaaaccgtttaacaattttatctatgcattgttacatattcataaataaacagtaatgtaaatgaaacgttttaaaccatttatcaacattactttacgttgatctacgaatcataaatgttttatctttttgtataacctttgaaaacctttatatcaataatcttattattcacgtattaaaaaacaaaaaattcttttgttcgtttacttagtttcttttttataatccatcataataaaacttgctgcatttgatctatttttataatagtactgatttaaatcaatcgtgccttcaatttgaccatcacgatacatcatttcattagtgaagttatttatcatcacgaaatcagcgcgatctcttataacatctaaatcgtcgtttcgtgcaaaaaaatgttctaaatttaaatgtgcgtaatccattgttacctcccgattacaaattttgttctatctactatttagcaaagtaataatacatcatatcacattaaattaattacttatgtcttatatttaacacttaatttagcgattacgcaaatgaatgatttttctaaatattttattctaactttatccggaaatatttgttatacgtataacttggagaatgactacttgaaatttaatgacgtatacaacaaacaccacaaaatcatacaccatcttttaaaaaaatataatattagctataattatgatgagtattatcaactactcttgataaaaatgtggcaattgagtcagatatataaaccctcaagcaagcaatctttatcctcttttttattcactcgattaaattattaccttatcgatttattcagacaacaaaatcaattaaaagatgtcattttatgtgagaataattcaccaacattaactgaacaaccaacatactttaatgaacatgaccttcgtttacaagatatcttcaagcttttaaatcatagagaaagactatggctcaaactataccttgaaggatacaagcaatttgaaattgctgaaatcatgtcattatcgctttcaacgattaaattaattaagatgtccgttaagcgtaaatgccaacataattttaattagtttattgtgaaatttcggtcgatgtgttagtgatgttgaaacaccctaacatcttcatataaatttattttaaccattaaattaacaacttattatacgaggagtactatatttgcaagacaattctactaaatatctactttatatccaaactgctacttcaaaccatctcgaaacaaattgtgtctttttacattgcgattacattcttaaagttccaattaacaaactcgtttcatattatgcgaaattgcatttatcatcacaaagtgtgctaattgagactgcaaaaaacatactaaatattaataaactggttcctatttacatcaacccaaaaactatactttttccgttaaaacataaacgtgcaccgatacaaatttatatcaatgcacattatattgttggtatgactgccatagagaattcaacattaatacattttcaagaaggcattcagctagaagttgatgagccattttctctagtttcaaaaaaatgtcatgaaagtttagctttgaagcacttcattgaaaatactatttcgaattaaatttaatttctaaaagtttcttagtaaagtatgatgtcacaatttttataaaatatatgctaacaatcattaataaaatcgctccaataattgttaaaataacaacagttgttgataaatctaccttaggactaacgaaaaattgtacgccagatagacttgtaattagcccaaataaaaacaagcctaataaagcaacataagcaaacatcatcactactaatgtaacaaacatactataactttttgtttctttatttcgaaatacattttgtcttaagtaagcattagcaaaggtaacaggcttatttaagttaacgctgtcatcatcagatatagaagataatcgttgatctaatgcttgtttctccttcttgttcaaaaaccataattgctttttaacttttttatcaaatgatgctttattcataattaaggatttctctcctttataatattgacgtaattttaaacattagcgtcaattgaaagtgtattttatatattttacagaaatatatgtatcaaatctacaaaaatccatattacaatttcatttatggtgatttgacgctaaaatacagtctgctaatttttcaaactaatgctttttaggtaggtacaatgataaattttaatcgtatatatgtttcatatataatgaatctagccttaaccatattgcattcaaaataattttaaaaaatgaaaagaaaggatttagcatgcaaaaattcaaagactttttttacgatgatttatcggttacacgaggaaattattttttaactttaatggcagcattttttattactatcattttatttatcggcatagttgtcagtgaagtacatttactttatagcatgctaattgtattagtaggtttaattctattgaggctattcaaaatcaatttattctcttttaaaaaattaacattgtctcaagttatttatattataggcggtgcactattaatttatgggttagataatctttatttatattttcatgacgtaccggcaaatgaactacaattagagcaagaaatacgaaatacaccattctatatttctattttcactgttaccatcatccccgctattgtggaagaaattgtttttcgcggtatgataataagggttatattcagaaaacacttatttttagggttacttgtgtctagtttagtttttgcatcattacacgaatctgacacttggattggttatttaccttacttatattctggtttgatttttggtctaatttatataaaaacaaaacgattagaagtggtaatattcatgcacttcttaaataacttgttagctctgctctttataatatggggataattttgagataacctttcatattattttcaaattatctatctgatatttattttattgaacttgagtcaccacttaaactcaaaaatacgtgtcatcaagtgcaaaataatttagaactaatacaaacataaaaacttttgctttacgcttaaaatcaaaagtcacatacctagatataagtacaacttgtatattttgtactctaataagtatgtggcttaaataatatttaattcttgagttgcatatagtaattgtttttattcattttctaaaatatgcgagactaatttccttttctactcctgttgaatcaatttagacttttttataactcgggcttttacttagctgaattttgacttcttcttcattaataactatgatggaaaaacccccataagcacaatgcctatgagggtttaaatatgtttataaattatagaatagaaagacctgaagattgaatatctttcgcaaagcctttaactgtatctactgataattcgttaatatcgcgacctaagtttgtattcacttttttcacaacatctgcagggcatgtaataatatctgcaccaatttcatcagcttgaatcacattgaataattcgcggcaacttgcccataataatttaacgccgtctttactatgcgtaacttttacagcctctttcattaatggtaatggatctacgcctgtatctgcaatacgtcctgcaaatactgaaacatatgttggcacaccttcagttactgcttcagttatttctttaacttgttcaattgtgtaaacagccgtaacgtttaatctcacattgtcagctgaaagttttttaattaaaggaatcgttgattcaccttttgtatttacaataggaattttaacaaatacattttcgccatattgttttaaaattgctgcttctttttccatagtttctaaatcgtctgcaaatacttcaaatgaaattgaagcatctggaatttctttcacagcttcttcagcaaaagctttgtaatctgttacgcccgctttcgccattaaactaggatttgttgtaaaaccatccacttgtttgtttttataagctgctttcatttcttcaatatctgcaccgtccgcaaatacttctacatttagtttagccatataatatagcctccttgattcttattaaaattttaacaacatctgcatgtctttttcttacaaccatttgtaaaaaatgatttttatttctttgttatataaaacatttatatcacgcttttataatatatagctaattttttgcctatattttttaaaaatgactttagcaaacattgtgtctacaagttaataaaactattgttttatgattgtttatgatacgatatgtaaatgataatcatccaggaggtctagcatgtctcgttcaaaaaaatacttttacttatctagcttaatgattattttaagctttttctttaatacaaataacgttttcctaagtggattttttaattcttttattaaattaatacttttctgcagtgttattaactcaattgtactaattttgtctataatttttgcagatcgttcaattaaatcactaaagcctgatgcagattggattagaattgcgagtaaaagtttgccttggattattctaattgttattttagtacatatcttttcaattgttcgtacattcggttttatttaaaaaagataaaatgtcaatgtagcgttaatacaaaacaatacaatgtatcatgctataatgagtaaaacaatttgatgacgttgttgcgtataaaaaatattagattttcgaaatcataactatgcatctaatcgctatagttatacaacaagatataacatataatgaggtttgataatgcatcgacaatttttgtcgtcgtgttgccaaaacctcttttttaaattcaaactacttcttttcgaggtgaaccaaatgcaatatgtatatatttttatcggtggtgctttaggcgctttattacgttacctcatttcttttctgaatactgacggaggttttccaatcggaacactgatagccaatttgactggtgcctttgtaatgggattgctaacagccttaacaattgcatttttttcaaaccatccgaccctaaaaaaagctattacgactggttttcttggtgctttaacgactttttcaacatttcaattagaattaatacatatgtttgatcatcaacaatttataactttactactatatgctgtaacaagttatgtctttggtattttgttatgttacgtcggtataaaactaggtggtggtttatcatgatatcaatcattttagtcatgattggcggcggttttggcgcaattgctagaagtgccattactgattattttaatcataaatttacttcaaagttacctatcgcaacattgatagtaaatctagttggtagttttttaattggattaactataggcctatcaatttcaatctcatggttccctgcgttctttgtcaccggttttttaggtggcttaacaactttctcaacgttagccaaggaacttacattaatgatgacaccaaaatttgatattaacctttttctcaattattcacttttacaattcatcattggatttatagcttgttatattggctatcatatttaaaaataaaatgcttcattcagcaaataggtaaattacgacaccttcctgaacgaagcattttttaattttcatgcaaattttttaacaccatataatgcctatcaaaataaaacaatctttgttgccgtttaaataatgtgaatgtcaataaattctccaaactagtcgaaaataaaacaggctgggacataaatccctaaaaaaacagcagtaagataattttcaattagaaaatatcttactgctgttctctatttatacaatacttcgtattgaatggcttcgctttcctagggtgccgtctcagcctcggtcttcgactggcactgctccctcaggagtctcgccattaatactacgtattaacatgtaattttacttttacatactttaaaaaaataagacactttgcccaacttacactaccaatagaaacttctgttagaattccttaaaatgatatttcgcgatatgtaaatgaaattgttgaaacgatacctgatagcgaattcgatgaattcagacatcatcgtggcgcaacatcctatcatccaaaaatgatgttaaaaatcatcttatatgcatatactcaatctgtattttctggtcgtagaatagagaaattacttcatgacagtattcgaatgatgtggttagctcaagatcaaacaccttcttataaaactattaatcgttttagagtgaatcctaatactgatgcgttaattgaatctttatttattcagttccatagtcaatgtttaaagcaaaatcttattgataataattcaatttttattgatggtacataagtagaagctaatgccaatagatatacatttgtgtggaagaaaagtattcaaaatcacgagaagaaatagatttaattggtagtcatttagataaagaaatcgaagatttaaatcattctatttagaacgaagattgtgctcaaattagaaaacagacccgtaaaaaagaactgagattaagaagttcaaaaagtaatttgatgattattccgaaagaaaaaataaatatgaagaacaaaaatcgattcttaaagatagaaatagcttttctaaaactgatcatgatgcaacttttatgagaatgaaggaagaccatatgaaaaatggccaacttaagccaggatacaatttacaaatagcgacaaattctcaatttttttatcctatgacctatttcaaaccccaacagatactagaactttaattccatttttaacaatgattcaaaataccttcggttatttaccagagtatattgtagctgatgcaggttatgatagtgagcaaaactatatggctattatagatgattttaataaaacgccacttattacgtatggcatgtttattaaagataaaactagaaagtttaaaagtgacatttttaacactcaaaattggaaatatgacgaacttaatgatgaatttatatgtcctaataacaaaagaataggttttaaaagatatgcataccgtaatgatagatatggttttaaacgtgacttcaagctatatgaatgcgatgactgttcagcatgttctttgaggcaacaatgcatgaaaccaaattcgaaatccaataagaaaatcatgaagaattataattgggaatactttaaagcccaaattaatcaaaagctttctgaaccagaaacgaaaaaaatctatagtcaaagaaaaattgatgtagagcttgtttttggatttatgaaggctattttgggtttcactcgaatgtcagttcgaggaataaataatgttaaacgagagctaggttttgtattaatggcacttaatataaggaaaatagcagctcaacgagctgtacattataaaatacatatcaaaaaagctgatttctatcaaataattaatagaaatcaacttttttacattgcctaagaacttaatgtcccaagccctgacaattcatctaaccttttcatcagttgagtgattttaatctatccttcaaaagtttttggatcaggtccaattctcttatcttgatttaaaccatcaattcgcgtcatttgttcatctgataattcgaaatcaaatatttggaagttttcagagattctgtttggtgttaccgatttagggattataaccacaccatgctgcacattccatcttaaaacaacttgggcaggtgactttcctaattcttgagcaatgtctttaattgtctcatcatttaaaatttgtgcattcatcaatggtgaccaagattccatcacgatatgttgtgctgccaaatataatttcaatttatgttgcgttaaatatggatgatattcaacttgattaattacaggtttaattgacacttgtgccaacaaagcttccaaatgttcaggttcaaaattgctgacacctatatttttagctttattatttttatataaatcttccatacctttccatgtatcaaccattacggcttcgttcgtgcctggccaatgtactagatacaaatctaagtattttaaacctaatctagataaactagcttcgtaagcagctgctacattttcacgaccgaaatcctcaaaatataattttgaagtaataaataagtcttctctagcaataccagttgactccaatccggcacgaatgccagcacctacttgttcttcattcccataaacttttgcggtatcaatactacgatatccttgttcaatggcatacttaacactttccatgcaattttcatcattttccacacgaaatgtccctaaaccaatttgtggcatcgtgtttccattataaaatgttttaacctccataaatatcgcctcacctttttgatgtattataccctgttatcataacaaatctgagttgaatacatgagaaaaaacacttagagcaatcaaccactaaaattctagtaatatctctcaaacattaatcaaattgtaaaagcaattatgtttaatttatgacaaactaaaaaagccgaagtcacaacatatagtcatcacttcagcctaacatttaattgaatgattcaattttatccatcatttgttgtaagtcttccacgttgtattgaatacgaccatggaatacaaatttgttaaagaactcgtctaattgttcagcaccgacaagcactttgacagcactattttgattataatttgaaatcgttacatcgccttcatttttaggattaaagtataaaattgaagttggcgtatatttggcacctaattctttttgtaagtcttcagccaattgtttaatcgcctcaatttgatctgaataatttacaaaagataatgaacgtttgtcatcattttgatccatcacaatagtttgtggtctagatttatctaaatccaatgtatcaaatacttgttccattggtggtaaatctttaaattgaccgccactaataccattataaacatgaccttttaacaattgagaatcaataatataaagaccagttcttgttaatactaaatgactaattcgttcaatattattaaagccatcctttggtaaaaagatatttgccataatgtgcatatcttctggtcgaattcgtttttctttaactaatctttcacgaataccaattaatctcatgtccgttacatattcactatgatttttcgagaacaattttaatgcgtcaatctcacgatcttttgtactaaccatgtgattataatcttcttgttgttttgtaattgtctttttattttgaatacgctctttctctaaagcttcttcatgagactttttaatgttttgttcttgttgttcatacttttcttctgtttgtcgcttaacttttttcttactacctaaggcaactaagaaaaggacaaaaaagattaatgcaatgactactgcaataatgagtccaatgactaccggtgaagataaatccatcacaacaacgctcctttttaatatatgaataactttaattataatagaaaagctaaagattttcgatacatattatcatttatataccgaaaatcttttatttagctatattaaattcatcttaatattttactgcgtcttttaattcttccactttgtctaatttttcccatgggaataatacatctgtacgtccaaaatgaccataagcagcagtttgtttgtaaatcggttgtttcaaatcaagcattttaataatgcctgcaggtcttaggtcaaagtgttttctaactgcttcgacaagttgtccttcagaaactttacctgttccaaatgtatcaattgcaattgacactggttctgcaacaccaatcgcatatgccaattgtacttcacattgatctgctaaacctgctgcaacaatatttttagccacataacgtgcagcatatgcagctgagcggtctacttttgtaggatccttaccactgaagcatccgccaccatgacgtgcatagccaccatacgtatcaacaatgattttacgtcctgttaatcctgcatcaccttgaggtccaccgattacaaagcgtcctgtaggattgatgtagaatttagtttgttcattaatcaagttttctggaacagttggataaatgacatgcgctttgatgtcttcttgaatttgttcaagtgtcacatcatcagcatgttgtgttgatacgacaatcgtatcaatacgtactgggttatcattttcatcatattcaacagtgacctgaactttaccgtctggtcgtaaataatttaacgtaccatctttacgcacatcagataaacgttttgccaattgatgtgataaataaattgctagaggcatgtacgtttctgtttcattcgttgcgtaaccaaacattaaaccttggtcacctgcacctgttgcttcaatttcttcttcgctatctttatcacgatactctaatgctttatccacgccttgtgcaatgtcaggtgattgttcatcaatcgcagttaaaattgccattgtttcataatcataaccatattttgctcttgtgtatccaatttctttaattgtttctctaacaactttcggaatatcaacatatgttgttgtagaaatttcgccggcgatcaatgccatacctgttgtaacagttgtttcacaagctacacgtgcatttgggtcgtcttttaaaatagcatctaatattgcatctgacacttggtcagcgattttatctgggtgtccttctgtaacagactctgaagtaaataatcgtttgttatttaacatagtttgctcctttaaatttatattacgaaaattctctctctgtgagctaaataaaaaagaccttctaactattaatatagagagaaggcctaatacgtccattcgctcttatcgttcagacctatttgtctgcaaacggtttggcacctttcttttataaaaaaagaggttgctgggtttcattgggtccatgtccctccaccactcaggataagagaatccgttaaaaataatagtacctaattaatgaattaatgtcaatttttcacaaataaatttacagtaaaatattgtagattaattatgttaatgtgttatactaattaaatgtaaaggcttacatttaaattatcgctttggagggatttaggatgtcagtagacacatacactgaaacaactaaaattgacaaattactgaaaaaaccaacgtcacattttcaactttcgacgacacaactttataataaaatcttagacaataacgaaggggtattaacagaacttggtgctgttaatgcaagtactggaaaatatactggtcgttcgcctaaagacaaattttttgtctctgaaccttcatatagagataacattgattggggagaaattaatcaacctatcgatgaagaaactttcttgaagttataccataaagtactagactatttagataaaaaagatgaactatacgtatttaaaggctacgctggtagcgataaagatacaatgttaaaacttacagtcatcaatgaattagcatggcataatttatttgctaaaaatatgtttattagacctgaatcaaaagaagaagctacaaagattaaacctaacttcactatcgtttctgcaccacattttaaagcagatccagaagttgatggtactaaatctgaaacctttgtcattatttcatttaaacacaaagtcattttaatcggcggtactgaatacgctggtgaaatgaaaaaaggtatcttctctgtaatgaattatctcttaccgatgcaagatattatgagcatgcattgctcagcaaacgttggtgaaaaaggcgatgttgcattattctttggtctatctggcactggtaaaacaaccttatcggctgacccacaccgtaaactaatcggtgatgatgaacacggatggaataaaaacggggtctttaatatcgaaggtggctgctatgcaaaagcaattaatctttccaaagaaaaagaaccacagatttttgacgcaatcaaatatggtgcaattttagagaacactgtagttgcagaagatggttcagtggactttgaagacaatcgttatacagaaaacacgcgtgccgcttatccaattaatcacattgacaatattgtagtaccatcaaaagcagcacatccaaatacaattattttcttaactgcggatgcatttggtgttattccaccgatttcaaagttaaataaagaccaagcaatgtatcatttcttgagtggtttcacttctaaattagctggtacagagcgtggtgtgacagaacctgaaccatcattctcaacatgtttcggagcaccgttcttcccgttacaccctactgtttacgctgatttattaggtgaacttatcgatttacatgatgttgatgtttatcttgttaatactggatggactggcggaaaatatggtgtaggacgtagaatcagcttacattacacacgtcaaatggtaaaccaagcgatttctggcaaattgaaaaatgcagaatatacaaaagatagtacgtttggtttaagcattcctgtagaaattgaagatgtaccgaaaacaattttaaatccaattaatgcttggagcgacaaagagaaatataaagcacaagcagaagatttaattcaacgttttgaaaagaacttcgaaaaatttggtgaaaaagttgaacatattgctgaaaaaggtagcttcaacaaataaatttgaatactaattaaagagccaaccgttgttatagtctaacaatggttggctcctcttattttatgtgctaaaaatttataggcaattttattacaacaatgcacatttaaggtgaccttcatgccaaactcgcatcactcatttaatggaagcagcacgtcttcacataaagtaccggttccttacgctatgcatgttgccccactttgcataaagtacttatcgttaactcaacgcaagttgttcctattcacaaaaagcacatacagttatctgcatggagcacattttcattgaaagcgcatacccctcattcaacgtatatcacacatcttcaaagcttgatagttcccatgcgcacaccacgtttcatactagctatgcaactcaacttgtttcataaactctttaatataagtcaatgtttcaaccatcgctggtggtcttggcacatgtccttctgccatttgataaaatgtttcatgcgtggcaccttttaactctagttggtccgctaaataatacgcatgatgaataccaacttgctggtctttccctccatgtacaattaatattggcggactgttttcattaatgtttggaatcgcttggcgtgcctcatatgccgctcgatcttttttcggatgaccaatcattcttcgtagcatgcctcttaaatcgacacgttcttcatacattaaatcaatatctgagacaccaccccagattgtataacttgttactggtaagtcttgaaatgtcaacaatccttgtaaaccacctcgcgaaaaaccaaccatgtggataaatgcatgtggatatttatcatgtagcaaccttaataattgcgtcacatcatttaaatcgccacggtaaaattcgtctttaccttcactcccattgttacctcggtagtatggcccaatcactaaagtttgactatctgaaaattgcattaatctacctgcgcgcacacgtcctacttgacctttgccacctcgcaaataaactacaatgcgatttacttcatgatgtggtgtcatcattaaagcttttacttgtaagtcatctgacaaatatgtaatttcttcgaattgatgcgtaaaagattcaattggcattcgtttacgtttgataaaatccaagtgattgcaccctctctacgcattttaaaatggtactatcttgcagtaagaaactccgttgtgcgagttcaatatcattgatacagttaaacaacactggccctgctgtttctaaataatcgttcttgcttaccaatgattcaacttcgataaaatatacatcttttacaaaatcagtttgatcatgtgtttcaatggtatattgtgctatgtaatgaatatttttaactttggcgcctgtttcttcatataattcacgggtaactgcttcagcactactttccccgcgttcccttttaccaccaggaaattcaatcccccgtaaattatgtttggtaaaaagcaattgatttttaaacgttggaatagctagcacatgattgccatctgctatctcattatcctttttaaatgtcaaattaacttgacgattatctttatccctaaacttcacgcgcatcacatccctacattgtatgttaatataatagttaattactatcgttggaggcattaattatgaaaaagatattcttggcgatgattcatttttatcaacgtttcatttcgccactcactccaccaacttgtcgtttttatccaacatgttcagagtacactagagaagcgattcaataccacggtgctttcaaaggcctttatttaggcatccgtcgtattttaaaatgtcatccgcttcataaaggtggctttgaccctgttccgttaaaaaaagacaagtcagcaagcaagcattcacataaacataaccattaatatggttgtaattgagttatatccactaaaggggggcgaaattcgagtcgcccctcttttaatatgcctgatttagtaaccacatcttgatcaaaataataacctgctggtgtaacatctcctggataatcacctttacgagcaagcatcgctgtaaaataacggcttaaaccatattcgtacatgccgccaataaccacttttacaccatgacttttcaaagtatcaattgccgtttgcactttatcaatgccacctagacgaaatggttttaatacaacaactttcacattgtataattctatcaaattaattatgtccaacaacgatgttgccttttcatcaagggctattggaggtattgttccatccactacttcatcaagcatggagatatctttaaatggctcttcgatataaagaacctgttcacgcgctaatagctgtaactgtgtgaaatcttgacgatccaatgactcatttgcatctataaccaattgaaagtgaaagtctaattcccgtaacactctaatttgatgcatgatttgaggcgtccattttaatttaattctggtcggctttgttgctttcaatgactctagttgtttatttgataagccgctcgctgtcgctccatatgctactgaaaatgaaggcagtacatgaaacatttgatacaatgccatgacaatagttgcccttgcagcaggcgtattttccaatgaatctactaattttagtgctgcttcatacgtttcaaatgatttatttctattatcttcgaaccattgctcaattacatgtttcactgaagcaattgtttcatgatcataccaatctgtttgaaaagcgttacattccccgaaatatgcatttcctttgtcatcaatcaattcgataaacaaacaatcacgatgcgttaaagtgactttcggtgttacaatttgtgacttaaatggctcactatatttataaaaatgcaaagctgtcaacttcatcaaatcatcctctatacaacttatttctctgtaatttacccgttgatgtataaggtaaagtatcaaccttttcaaagtgtttcggtactttatatttcgctaaatgttttgataaatatgcaatcaattgtgcctttgaaatgtcactttcactgacaaaatataatttaggcacttggccccaagtatcatcaggatgccctacacatactgcgtcactgatacctggaaattgcttcgctaccgtttcaatttgatatggataaatattttcaccgccactaataattaaatctttacgtcggtcataaatcataacataaccttcatgatctatttcagcaatgtcacctgtattaaaataaccattttcaaacgtacccgttaaatctgttggatacaaatatccattcatcacattggcacctttaatcattaattctccatgaccttctttattaggatttttaattttaacgtcaacattggcacttggcatccctacagtgtcaggacgtgcatgcaacatttccggtgttgctgttaaaaattgcgaacatgtctcagtcataccaaatgaattataaattggcaggttatattgtaatgccgtctctatcatagtggcagataatttagcaccgccgagtaatattttttgtaaattataaggttcatgtaaaccttgttgcataagccaatttaaagtttgtggcacaagcgaaatgtgcgtgattcgttcatttttaatcatcgttaaaatttgttcggcattgaatttatcaacaatgcgcacagtaaaaccttcaataacagctcttaaaagtacactgagacccgaaatatgataaatcggcaagacagatagccaattagtgtcacgatcaaatcccaagctctctttacatccgattgcactggcataatgattacgaaacgtttgtggcaccgctttttgagggcccgttgtccctgatgtaaacataattgatgcaatgtcatctaaattaaatgatgtatttaatatgttggacggcgactctttcggcaccacagtttcattcgatgtatcatattggatacccattgtgttgtccaacaaaccgttcgttgtaatatcccttccagcgaattcaatatcatccagcgatacaatttgaaaccctcgcaattccagtggcaaggtacaaaaaatcaattgtacatcgattgacctcatctgattcgtcatctcattaggtgtcaaccttgtattaatcatcgcaatttcaatatttgccaaccaacatgcatgtattaaaatgatcgattgaatcgaattatctatgtatagcccgacacgagattgttgataagccttgagtcttttagccaatagactcgcttcacagtataaattttgataagtataagattcttgaccgtctgttatcgcaatatgatgtccattttgttgtgcttgtttatataaccaaaagtccatgcgttattcctccaaaatcatttacattataattataacgattttatgacattctagcagtggttatgtttaaaaatataaaaaagtagacgaattgattcattgatatgattgttataatgctcaatacatatcgttatatcattcgtctactattatcagttatttttatttaattttagtgtcattctgtcattttgatgtggtgatttacccattgttgccacatcatctgcaatgtcaattggtatacgattcatgtcttgtaatgcacttaaatggaatacttcatcatctaaattttcaatgagatatacataatatgttaccttgtcctttttatattttaacgttttccaaaagtccggcttgcaattcaatacattatccggaatatattcaataaataagtaacgtttgctgcctactttgtctatgaaatattttgcagtgcctttttctatacctcttatatgtgcatagtctgctgaaaagtaaatactacctattgtttcattatgttgttgtatttcaaatcgttggcctactattttattatttgtgccacaactacttaaaaaaatcagtagatatagcattaaacatattttcatccccttgaattttaaaaactttttcaaaagcaacacctctaaaaataaatacaatatattatagcaaatagaaattattattttgttaaattatgttgtcatgttcgtgtcattttgagtcgtaatacaactttacaattattaaattaacacttctacaatccaaaaatatttttaaagttttgaaaaaaattaaagtatttccactactaatttggtaaaatatgattatgtgatatagtgaaagcgttttacacttaataactccctcttaaatgcatccaggttttatgtagtaaatcatgaaaataacatataaatatagaggagatttacctttgaatacagagaacaacaagaatcaaaaccaatctgttaaaaattctgaaagacgcggcatgttaaaaggatgcggcggttgccttatttcttttattttattaataatcttattatcagcctgttcaatgatgtttagtaataatgacaattccactagtaatcaatcatcaaaaacgcaattaactcaaaaagatgaaaataaaaatgaagataagcctgaggaaaaatcagaaacagctacagatgaggatttacaatcaaccgaagaagtacccgcaaatgaaaatactgaaaataatcaacatgaaattgatgaaataacaacaaaagatcaatcagatgatgaaattaacacaccaaacgttgcagaagataaatcacaagacgacttgaaagatgatttaaaagaaaagcaacaatcaagtaaccatcatcaatccacgcaacctaagacctcaccatcaactgaaacaaacaggcaacaatcatttgctaattgtaagcaacttagacaagtttatccgaatggtgtcactgccgatcatccagcatatcgtccacatttagatagagataaagataatcgtgcatgtgaacctgataaaaattaaacaacaagcgaattgaattcaaattgtatttagctttatgcactaatcacatagtaaataatgagggagattttttaggcatgagcaatcaattcaaaagtgaagaagaacgaagacaatgggaacaattccaagctttccaaaatcaacaaaaccaacagcaccagcaatacggacaaaagaaatctaaaaaaggatggttctggggttgtggtggttgtctagtattatttattttaattatcatcggtatttcagcttgtacagctggtgtcactggtaaccttggtggaaatagttctaaagaagcgaacaaaacccataaaatcggtgaaactgttaaaaatggcgaccttgaagtcactgtaaattcagtggaaactatgaaatctgtaggaccgtctcttgcaccaacaaacgctaaaggtatatttgtcgttgctgatgtgacgattaaaaacaaaggtaaagaagcgttaacaattgatagttcaatgtttaagttaaaatccggtgataaaacatttgaagcagataatacaggttcaatgtctgctaatcaaagtgacaatggtagtatagaaaattcatttttcttacagcgtataaatcctgatagcactgcacaaggtaaaattgttttcgatgtgtcagaaaacatagccaacgcaaaagataaaaaattagaagttatttctagtttatttagcgtcaagaagattacatttgatttatccgatgctaaaaaaacatcaaaagctaaaaaagacaagcaagatacagaagtagctgttgcgagttcaaatagcgataatgtaaattatgaagcttcggctactacacctgctacaacttctagtgcggatactgattctgaagatagcgaaaagtctagtaaagatgaggataaacagaatgcgtctaaaagtgataaatctagtgtagaaaaaagtgaatctaatgaggaaactgctactgtagagcccatgccccagagcaaacctaccactagtgaagcaccacctagtcaaaataatcacaacgaaaataacatgtatgatgcttcaacagaataaattttcagagtagctcagctacccttctttttcggtaaaaataaatatacatagcaatataaggagattaaaaaatgaaattcaaagctatcgttgcaatcacattatcattttcactattaactgcctgcggtgctaatcaacataaagaaaataatagtaaatcaaatgacactactaaaaagacgcaagaaactgacaacactacacagtcaaatacagaaaagcaaatgacaccacaagaagccgaagatatcgttcgaaacgattacaaagcaagaggtgctaacgaaaatcaaactttaaattataaaacaaatcttgaacggagtaatgaacatgaatattatgttgaacatctagtccgcgatgcagttggcacacctttaaaacgttgcgctattgttaatcgacacaatggtacgattattaatatttttgatgatatgtcagaaaaagataaagaagaatttgaagcatttaaaaagagaagccctaaatacaacccaggtatgagtgatcatgataaaacagatggtgagtcagaagacattcaacatcatgacaatgataataacaaagccattcaaaatgatacaccagatcaaaaagccgttgataaaaacgataaaaatgctgttaataaagaagaaaaacatgataaccatgcaaaaaattcagcagaaactaaagttaaataagggtatactttgattaattgtaatttttaggagaaaaactatgataacatttgagaatatacaacaacttgaaaaatacaccttaatgactatgcatggtctttttaatcaacttaaactcggtattatttcaatcgacaatgcagagcataccctctttacaccttatatgatggaatcactctcttccctaggtgtgaaaccagacattatcgatttaattcacaaagggacagagttagaagactttgcagcatttaatttatcaattgaagatacagttacagtctgtttacaaagaactgaagaactattaaatcaatacaaaaatgtggaattcaatgacaaaatattaatcaattggcgtattatacaagagtaatagacatataaaagtcgaatgtaactacgtgagtactgattttattctttgtaaattacaagcatttcatatcataaagtttgaaaagaggtatattgaagtggagaaaaacgaatatacagctaaatataatgaatatagtcaattattagacgctacttactcgcaagctgtagcataccttttaaataaatatggcgctgtaaccgatgattattataaggaaaaatcatacacgcgatttttaaatggagaaatcaaaagtatttcaaaaggaaaatacactagagctagcgaaggattatattgtcatcacataagcgaagacaaattccaaaacttatctgacctaagattcatttccgaatttaagtactcatacaacgttcaaaagaaagaaaacttagtgtactgtgatctaatcgagcatttaattttacatgcaattattacaaaagaatccaatggccaatttggtgtggctggattatgtcaaatgatcaaaccaacagtcattgattggtacattagcgaatatactccaaaaccagcatggatgcaagccaccaaagcacgtgcctatttgcctagaatattagtagagaaactactcattaaaattgacgatatgttagaaggaatagaaatatatgatttccttgagtctagataaatgattaatggagatttattttttgctgttgagattttgttatagatgtttaaacctgtaattaaatatattttataaaatagaccacgcatacctatctataaacggacaatgtttataaatgagtttgcatggtcttgaattgtattaaatttcttttggttttaatagttcacttagtggtatgtcaacattttttagacagttttcatgtgtatatttttaaatgccactggcgtcaaatactgtaatgaagaatgtggtctaaaattgttgtaccaatttacataatcaaataattctgtttctaactgttctaagttttcaaattgcatttgttttacaaattctgttttcattgctttcatcgttgcttccgcaactgcgttatcataaggacaacctttggtacttaatgaacgttttattttaaatgtttctaggacttcatctatcaaatgattatcaaattctttgtctctatcagtgtggaatagtttgatttgttcaagattatgatttattctgctgattgcttttgatactaaattggcgtccttatttttacctgcactgtaaccaacaatttctctattaaatagatctataaataaacatatgtaatgccatgttcctccgacttttacatatgtcaaatcacttactaatgtctccattggttgttctctattaaaagcgcgattcaaatgatttttaattcgtttttcattagtttctatttgatgatttttgtatttagctttcatataaacagaaactagattttttcataatcgacctatcttttgtccagatacagtgagacccttgtcatttaaatgatttttaattcgtcttgtactaaagacttttctattagaattaaaaatatttatggcggcacgttctacgtttgaatcatctttagtgattttattatcttttctttttatagaatcataataggtacttcttggtatttttaggactttacacattgctggtactgaatattgatgtgcattcttttgaatgacttctatttttgccccataatcagctctttttcttcatctgttaagttatcttggtgattgaatgtacccttgttttgatgttactttatccattttcctaacgtcaaaggtgttaaatcatactcgcgtataatttcatttcttggcttaccattttcatataatctaaccatttataacttaaactctgaactaaatgttcttctttcttaaattaacaaaatctactctcatagaatttgtccaattagatgatataatagtagagtcgcctatctctcaggcgtcaatttagacgcagagaggaggtgtataaggtgatgcttattttcgttcacatcatagcaccagtcatcagtggctgtgccattgcgtttttttcttattggctaagtagacgcaatacaaaataggtgacatatagccgcaccaataaaaatcccctcactaccgcaaatagtgaggggattggtgtataagtaaatacttattttcgttatctcaattatactgctaatctttctctttgtaaaatatgcaaggttttaaagagaaacatcaagaactaaaaaaggctctatgccaaattggcctgatgagttcaatatcggaagttaggcaactaaacattgcttagcttcctttttactttttggagcgtaaagttttgaacataataatattcgatttcgcaaatgattataacttccttaaccaaaagatgtacgtttaattaattttattttgttgtttatcccttctaaaggaccatttgattatccttcgttttaaagttaatgccttctttccagtcaaactgtgcttgatgactggcttttgtctcgaatctcgttttgcctttaggcgacaaccgttgataacctttcataaaataacgattaaattcatcatgtttaaggatataagctctaaatgtagaatatgcacaggttaatccatgtttatctttcaaatattgccaaagaataagcttatagtagaacttttgttcactagagtctgaaagtaatttttcgatgataggataatacttgtcaataatagactgacgatttctctttttggttggctcaaagccatttaaatatttatcaactgttcttctataaacacccatgtgtctcgctatttcacttttgtttattttcatgtttaagttctccatgacaatttttaattttggtaaatctgtaagagtagtaacttcaaaatcagtatttatgtctaaagataatttcattgttgttcatctcaataaaattatctataggtttttaaaaattgtacatgtttaaacaatcaaaagtgcacattattaaattatcatttccagttaaactgtcttgatgattgaatgactcagtattttggttttgttttgtctaatttgagagagttaatgatgttagattatattctcgtataatttcgtttctaggcttaccattttcataaagtttaattattttaatttaaattatttactaaaagctcttcagtctcttgtcacaataaaatcgcctaacctcttagtttaacaatatctattcccatagaatttgtccaactaagtgtagacgattcactaaactccaaaaaaataaatcccaaattataatagtttcaatattaatatattacaatttattcatagaatttttatcattttaattaataggctgttatctggattaaacaaacattttttgtaatagttcttttttacgtacttttaatcgtccgacttttgaagattgtttttcaaccaatctatctatttcactgaaaaaatcaccgattttttgttgttcttcataagatggcaatttagtctttatgttttgcaagtctttttgtgagagtaccaattgtgatgtaccagttgcatatttaatatattcttttttcagttgatagtttaagtgtaatgttaaataatattgatttgcatctatccctttaaagacagggtaatatttactaataatacctacatcaatcattagatttaaattaaacttaaaaattccatcgtcgcttcttgaacggtatgttatatgatttttagggagtatgaaatacccaatattactctctgcaaaagttttcctatctttatagtagtctgactgaagtattaaaccttgtcttgacgatgttaaaacaggatattcattttcattaatagttcttttattactaaattctaatacatcttttaattgctttttgttccatcctttatagtaattaccttcttcatctttgaatcgtaattcttgtgagaagattttctgtatatagcattttttctgttgttgaagtaattcaagtttttgttcttctaattcaatttgttggtcaagtttgctgaagaattgtcctattttttgttgttcttcaaatatagttggggtgaagatttttaaattagcaatttctttgaagtttagtccttctcgactacctccactttgtgcaaggaaaatttttcttttaccttttcttgataatagatactgtccaaaaaaattataataatactctttttttaatctaataatacatacatgttgatttaaattagcatgcgtttcaactatcgaattaatggctgttctacctattgatgctcctgtaatatttaaaagaacatcaccatagtacgttctactatttttcatctcatcatctatatctttactaatataaactaagtcattaagatttaatttaccatttctaatattttgactccttaaaaatggtatgcctttgtttgtatagttttcacttccacctttgggagtctttccactacctattttggtagtaagattccctaacttcttctcttcccattcgccctcaaatcctgggaatctcaactctggcacatttttcgtttgtgtattactcatctttcaacaccccaagttctttcaggtatgcattgatttcttgttcaatttctgcgatttctttgtcgatatttttcaaatcttgttggacttgatctaaatcaattggtgcttcttcttcgaatgtatcaacatatcgcggtatgtttaagttgtaatcgttatcggcgatctcttgtaatgtcgcgctgtagctatatttatcaatcgttgctttacgcttatatgtgtctataatacgttcgacttgggcatcgcttaaatggttttgattttttcctttttcaaaatcattggatgcatcgataaatagtacgttgtcgtcttgttggcgacattttttaaatactaaaatacatgttggaatacttgtcccatagaaaatattggctggtaacccaatcacggcttctaagtagttcttttcttctattaaatagcgacgaatcacaccttctgcggcaccacggaataatacaccatgtgggagtacgactgccatggtaccttcatcgtctaggtaatgtaccatgtgttgaataaaggcaaagtctgctttggattttggcgcaagcttgccgtaaccactgaatcgttcatcattttcaaattttgaatctgctgtccatttcgcactgtatggtgggttcgcaataaccgcatcaaatgtattgcctaaaaaggctggattttccaatgtgtcatcattacggatctcgaagttctcataacgcacatcatgtaataacatattcatgcgtgctaagttgtatgtagtattgttacgttcttgtccgaaataacgatacacttgcgtttctttaccaacacgtaacaacaatgaaccggaaccacatgttgggtcgtacacgtgacgtaatttatctttaccgtctgtgacaatcttcgccagtatcttagatacttgttgtggtgtatagaactcgcctgcttttttacccgctgtcgccgcaaagcgcccgattaggaattcatatgcatcacctaacatatcaatttccatgtcactgtgaacgaatggtaagtcgtcaagattaaccatgactttagagattaaagcagtacgttctttgacattgttacctagtcgcgttgaactcaaatccatatcgctgaacagcccgataaagtcattttcactttcttcacctaatgtagatgtttcaactttgcgaatcgccgtcgctagatgttctatatcgaaatcttgcgtttcaatttcacgaatcatcgcactgaataaatcttgtggctcaatgaagtaaccgacttgatcaattaattctgcttttaagtcttcacgatattcttcatctgcccatgcttcttgatacgtgatgtcttcacctgacaaggcatctgcatattcttgttcggctttttcagataagaagcgatagaaaatcaagcctaaaatgtaattacggaattcactcgcatccatgttccctcttaaatcattcgcaatcgaccataattttttatgtaattcagcttgttgctgacgttgtttttcagtaatagacatgtgattcctccgcctttgcataagtaatttatctctttgtgtaatagatttattataacatttggttatgttgcgatgttgataatttggatgttggtggtggaaattttgagttttagtggcgcaattgttattgaaaaattttatagaaatgttgtagctttcaaatgctttcaaaatcatttatattcttaatgatgtcaaaaagttgttcattcatacataaataaaaccaatcaacaattgagttggtgaaaatcaatcgttgattggctttgatgcatattaaataatgcaatatattaataaatgttagttatagtatattttgtcaggattgggtgaatgtctaagttttaattatttatctaaattatctgcaatgaatttcttaatttcaggagagaaataaacagcaaatcctcttgtgctttcacctgatggcttattaccggcatagattacaccaatagcttcgtgtttactatttaatataggtgaaccagagctaccaggctgaataattgcatccgatgacactatattcccattcactgataatactttaccagttgattcatacatttgtagtttatttccattaggatttggataaccaatgactgatataggttcattttctttagcttctgatgctatattaaatttactagtgaaatctttgaattttctaccttttggttgtgttgatttttcttcaacttgtacaaccgcaatatcttctttaccaggataatctacaatcttagtaactttataaagtccaccaccgttattataaaaaccattaggatgtgctttgatttcatcaccgactttcatgtgataggtaacatgtttattggtaatgattgtatgatttccaactacaaatcctgttccagcgcccatccatgtaacaccactgtatggtgcaacatttgtatttgtaatttgtttaacagtattttcggctttggctgtttgttgaataccttcaaccattgttgtgccgacgccagtcactgatgttaaaatcgtcaatgctgcaatacttttgatgattatatttttattcatttttgtgctactctaagtattcgtataaatataaggttaggttttggaagttttattttttaaatcatttcgaataaatagaatcacagagatgtttaaaattgttgattttgttgttaatttctaaaaatcatttatcaatgtatggatggatgatttatttatctaaattatctgcaataaatttcttaatttcaggagagaaataaacagcaaatgaccttgtactttcacctgttggtttatcactagcatacataacaccaattgcttctcgcttactatttaatataggtgaaccagagctgccaggttggacaaccgcatcagatgtcactatatttccattcactgatagtactttaccagttgattcatacatttgtagtttatttccattaggatttggataaccaatgactgatataggttcattttctttagcttctgatgctatattaaatttgctagtgaaatctttgaattttctaccttttggttgcgttgatttttcttcaacttgtacaaccgcaatatcttctttaccaggataatctacaatcttagtaactttataaagtccaccaccgttattataaaaaccattaggatgtgctttgatttcatcaccgactttcatgtgataagtaacatgtttattggtaatgattgtatgattcccaactacaaatcctgttccagcgcccatccatgtaacaccactgtatggtgcaacattcgtgttggtaattaatttcacactattttctgctttggctgtttgttgaataccatcaaccactgttgtgccgacaccagttattgatgttaaaatcgtcaatgccgcaatacttttgatgattatatttttattcatttttgtgctcctctgtttattcatgatgcttttgatatagacgtttttttatgttatattcgaccgatgtttttcattaaaattattgaacacatgctcatggtgtatatttaaatttgtttattgttcaatgtgcttttgaataaaatctttgatttgaggcgtaaagtatacggcaccattatattcagaaccaatttttccaataccgccatacaccacacctatgacctcattgttagaatttagaactggtgatcctgaattcccgggttcaatgtatgcatcaaaatttaaaatattgtctttgattctttttatagttcctgtagattcaaactgtttaaaactattttgagcaggtaatgggtaaccaataactttaattttgtcatcaactttagcatctttcgcaaaattgaatgcttggacattttcattaaaattaaagccttttggtccacgttcaactgcttgttcttcaatattcatgacagagatgtcttcatcacccggataatcagaaatgcttttaattttatatataccaccatttcctttgtcaccgtttggatgggcagtaattctatcgccaactttataatcttttgatacatgtttattggtgataattgtattttttccaattacaaaacctgtcgcatccttaaatgaaacgacgccattatatggaaaattatttgtatctttaacttgcgtaacattcttctctgcatttgctatttgttgtgtctcttcaacgactgcagcatttattccagttactgaggttagaatggctaatgctgccatgcttttaatgactatatttttattcattttcaagctcctttacaattcgagatatgttgcaacgctcgtttaaagtcaatttgtttatttatctatgttttctgcaatgaattttttaatttctggtgtaaagtagacgccatatgcatttctgttatcatcattttttacatcagaagcaaaatgaataccaactaattcgttgttgctgtttaatacaggtgatccagagtttccgctttcagtatgcgctgaatatacaatactgctaccttctactgacatcacagggccagttgactcatataaaacatatttatttttgtatgggtgtggataaccaatcactttaattcgctcaccagctttagcccctgccgcatatttgaatggcgttacattatcattaaaattaaagccttttggtccacgttctattgcacgctcttcaacttgaatgactgatacatcttctttacctggataattaataatctttttaatcgaataaataccaccattacctttatcactatttggatgtgcagtaatacgatcgcccactttgtaatttttcgacacatgtttatttgttaaaatagtattctttccaactacaaatccagttgcacttttaaaagcaactacaccagtatatggaaaaatattagtatcttgaatttttgtgacattattttctgctttggcagtttgttgaacttcctcaaccaatgttgttccaatacctgttacagatgttaaaattgttaaagttgctaaactcttgatgactacgtttttgttcattttaagttcctcttttttaattattttgatatctagatacataattcagtatatttagttggttatgtaaccgttttcttaatcactctttaaaaaatcaacttcacgaatgaattgatgatacttatttttcaatattattttgaataaattcttttaattgtggtgtgaaataaacaccgaaattcttttcagattcatcttttccactacctgcatataaaataccaatcagttcatgtttagaattcaatacaggagatcctgaattacctggttgtgcatacgcatcaaattctataaacgttccactgatatggttaatcgttcctgtcgattcaaacattttatattttgtttgtgcaccctttggataaccaataacagaaattctatctttcgcttttgctccttctgcaaattttgtataactaacgttcttattaaaattcaaaccttctgtacttgtttcatgaacatgaactatcgcaaggtcttcttttccaggatattctacaatgtctttaacgtcgtagtttcctccgcctttacctttactcgaataatgtgctgctactctatttttaaaaatatcattacttttagcgatatgtttgttagttacgattgtatttttaccaacaactacaccagtaccacccgcaaatgctaccactgaattgtatggtgccttagttgcatcggtaatttctttgacattcttttctgctttggcaattgaatgaggctgattagaaatattttcagcgaaaccaagagatgttaaaatagttaaagcagttaaacctttaaccattacatttttattcatattttacctccttccaaatttatttttatagttaatgtatctagatacgcatttactatatacattttaaataaaaatattaattaaatattaattaaccacttattaacattttattaaataattatacatgaattgactcatttatttaaatatgcttaaaactcaatatcacgcaattaaaattgactttttaggattattttggtcttaaatattaattattgaattaaaattgtaatatttattcggaaattaggtaattgaaaatatatggcggaatggtgaacaattcatgtatttaaaatctttcactttattatgtattgtgtttaacaatattattagcgattagttcccctattatttatgacaatatgcagtcaatcaatgaaacatgtatgtatgagtatatttggaactagtaatgtattgttaattattgaagatgattgaattatggaatttttttcgagatatgttatttcggggatcagattttgcgatttcgccttggatagagtagttgcgatttgtaaatacgtttttcaggttcgattcaatttcgttgttaagataatatggattagtttcactgacatgttgatgcatgtcttttttgttctgataaagtataaaatgtttacttaacattacttagtatgacacctgctaattcaaacattatttgagacattcttttcaaattaattataaatttttacctatagactagtttgatatttatctacatctcaaaattctcatcaacaatctttcacatccaacatttttactttagtttttataattcaaaacaacaaaacgatgttaaaaaattattctattttttagttaatagatagttaatacatttttgatatttagttaattgttcttttaaaaaatattattatattttcattgtaaacgtttacaatataaaaaaaggagcaattaaaatgaatacaaaatttttaggtaaaacattagtagcaagtgctttagtattaacaacattaggaacaggtttacattcttcatacttaggattaaatacaaataaagttgttaaaacagcaaaagcagaagaaaaaatgacaaatggtcaattgtggaaaaaagttaaagattcattaattgattcaaatattattagtggtaacgaaaatgaagagattacagtaacatatgttaataaaaccggatattcttcaagtgtttctgcctatggtaataataatgacgatttttcaagtactccaagtaatttttctaaacttaaggaaattgacttgaaaaaagataatgtaccgtcagatgattttaatactactgttagtggtgaagatagttggaaaacacttacatctaaattaaaggaaaaaggtttggttacagatggacaaacagtaactattcattgtaatgataagtctgacaatacaaaatcatctgtttcaggtaaagtaggagcagatctgacaagtggcaatggaactacattcaaaaaacgctttattgataaaatcacaattgattaaaccttaaactcaaatttccttaattcataaaaccttaataactaaccctttcttacaaaccacctagcccataatatattaaaacgtcatttttatttcaattagcggaaaataaaaaaaccattccgcattaactttggcaagttggaatggttaaaaaatattttagaagccagcgtttggcttgctttgacgacatgttcgcgcatgtcgtcttatttttacatttatataataacacgcaattcaataaaatgtctaatcaataaacctcaattacattcaaattcaaaaactttgcacctaatattcatcgcttaaataaacattacgtttaattaaccagacattgtcaatcgcgtctaatacccctgctgtccgaatacaaaattattttgtattcatatttatctgttctctttcctcccttttaaacgcaactaaatttcttttaccattagcgccccaatctttaatctttaattgttctaccgctccatttattaaatcctttaaagagtaaaactgctaatagcaacgtgataataatatagatcgccaatgttaatgtaactggtatactcccttcgataaacatataaacgtaacacgtagcatatgtgattggtaaatagaaccacgaatgatctccaagcacttctaatccaaaataaacgttaaaaataaacattaaaactccgacaacaatagccattacatctttaatgaaaaatatatctaacattatcacaaattattaataatgttaaaaatgacggtactaaataaattaataaatattccattgtcatgtattgctaaacgattatgacgctaaaaaggaataattattaagtttatagaaaacatctgtataacttactacaaatactgaaaataatataaggatttaagatcgtaaaatctaaactaaggagatgtttaaatgcatttgaaactgaacgatgaagatttaaattatttagtaaatctaagtaaagaaatacttgaacaatacaacattaaattagacgaaacttgtaagggagatattaacataacatcatgtaattctgaatactttttcactttaagctattttttaaagcctggaaaagcaactataaatttcagagaatgccgttacaactatagcttgttacgtttaaatcttaatgacggttttcataaaaactctaataatgagaaaataaggggaaatagaattaatatattttctgaaaaagaatttatacaaaaagctgacggcgcaacccatatgaaagcatatcctttaccttataatatatttgacgatagctctgattttgtaaaacaattatttactttgcttgaatatacaaaaactaatcataatgataatattaaaattgaaactaatctattcatgagttggtgatactatgcatgacaacacaattaaatctattagcaaagactattttgattacttacaaacagaatcaaagtttatcccattagaaaatgaaactatagaattttattcacctatcgtcgattattttggtgattctatttctgtaaatatatctttttcaggggatcgatataaactaactgatcatggtgaaactttatggaacatggaacaattaggtatagatttaactagtaataaaaaacaaaaaaagtatcaacttctcaataatattgtacaaaactacagtctagtcatcgaaaataagcacataaacttttatacaaatagaataaacttatctcaagctattcatgattatgttttggctatttccgagatcagttatttgggaatattaaagaaagaaaatattaagtccttatttaaagacgaagtgatgcaatattttctatcaaacagaaagatttatcctaatatatttcccgaatttaaggtagaggggaaatctaagttaatccatagtttcgaagcagtatttccaggagaagctacagagtatgttaaaacaattaaacgaatcgataaaaacaatgcaaaaaatgtccttttcgattggaatgatgttgaaatacatagaaataaaaattttgattctaatgctagacttaatatcattacagaacaacaagatgatattagcgaagcagtatcaacaatgttgtctcaatataatgtagaggtattttcatttgaaaacaaaaaacaacttgaagaaaagtttagtaacgtataattatcgtgttatataatgtttcttcgataatagtttctatttcaattaaatcaccgatacttaaaatgataaatttaccaataccaagtttgtaatgaactttcaccgtcatacaatcatagatgctatatctacaaaacgaaccacgccgattaagacgtggttccatttttttaataattttttatatgttggaagtttctaaataattctactttcgtaaatttagcaccctgctatttagcaaagtaatctacatttccctaactaaaaattatcatgtgtgtaaataaaaattatgttagttctttaattccgtttgataattgaaataattgcactttgttgattatttaatcatatacaattctatactccaggattagtttctttagaatccgtaccgattaatttaacagtatggttttgccagtcaacttcataagtagatgtaaacgttactgtattttgatttttgtagttattaccaatccagtgtagtcgattccattgattagtatatctatccatttctctttggtaagttactttgattttagatttttttgtatcattttgtttatgagaaagtacgcttataaattctgggttaaagttaccacgcgccaataaaggcatttgatgtgttggcaagaaattttgtccagcatttgaactactttgtctaccacctaaaaacagttcattaccatatgttgggtcataactatctctaccatatggtccccaaccattattcataattttgtgcgcctcaacaccccagccaattgatttatgatttgtttttctatcaatcgtagttctgtaactttcttgtttataatttattgtttctgaaaatgattttgatccattcaatccacctgataagccattagatatattaatatctccgccataagaataacctaatgtttgttgaacttggaattcttcattttgatttttaggtgcatagtcaacaacatttacagcatcatttgattctgaactaaccgaaacattatacttaccgccccaataaaactgtgagtaattgtaatcttttggattaggctttttataacctgaattaatgtttccggctgccttaagtactaatgtatctttgtcataacttttatccttaatgaaattaaacgttaaaatttgagaaatattcaatttatcattatcagatgttgctgttgttttgtataaagtgattttgtcatctacttttttctcgcttacaggtgtgatatgttgagctgcatcaactgtattcgatagcaaaagcagtgcaattgatgaagcaactgatgatttgactaattttttcattttcatattaattatgtcctttcactttaatttcgtgtgttttccaattaacttcatatctaactacaaagtttctatttacaaatgcattatgctttctttctgcgtaaataccagttctagggaataaagtcgcatatgtaatatctaagtttctaccatatgaaatttcaaattcactcgtatcacttgaacctttttcatgtgatagtgtagtgataaatgatggattaaagccactttgaactaaaggtggcaattgattatcaggagcaaaatattctcttgctgaacctgttggaccatttggactttgtacgaataaatatctatcatgcgcagattttttaccatcaggcgtaacaaattcgtttgctttaacaccccatttaactgattttgagttttgcttgtctacttcactgacataactcttttgggtataactaattgttttagaataattaaatgagccattgccacctatagatggtgctgactggaaattacctccaatgttatatcctaatgtttgaccaacatcagtagtttctattttgtttttaggaaggtaattgattaagctaacatttggatctttagtcgtcagtcctatattatattggaatggccaaatcattcgtttagtcaattcatatccactacccttcacatctgaaaatgaagttctggaattaataaaaccttgcattttaacaattaaagcatctttgttatattttttatcttttacaaagtcgaattgaacattttgagtaacgccccatttcttactacttacatcctccgtacgtttgattacttcagcaccatcaccaatattctctatattagtattagctctagattcttgaatcggagatgctaaaggcgcaatcagtcctactgacaaagttgcagctaacatttttttcttaaacataagtttcactttctttctatataaatttttaatacaaatttattctagattatttcacttatttataaaattaactgttcattaaaaaataaaatgctataaaatattaaaaatgatacaatttattcatttatgatgctgaaaaccggtcattttggcgcaaccttcattacatttaaatagttccctttatactcgaacaatatgataaaattgccgatgctcaactttttcgctataaaaatcaaaacgaactttaatcaaatcttaaaaaataatgtttgtattatcaaaaataatctataattgaatttaaaattaactgattattaactattgtccgttaaacggagaggattacttcgtatactgttataactgaaatcttctatatatcatttcgtaatatcgctagcttcatctaaaaaatttaatgctatgatttagccgaattaaaaacatatatatatttactatgaactaaaatttcactttaaaaataaaaaaccatgatttcgaagtcttcataaactgaagcttctactctcatggcaatttatactatgatattcaattataatgcctagtctcatagtaaacggctactacattcgcatgtacttcgttttactgtccacgcatggtcgttgacttatttatattataatataaatattttatttttcaatacttaattttaaaaatcccctatgaaaatgttgatgaactacatctttaaatcttattatacattgtataaaattatattgcgaggtactaaattgatgatatacacttttggttgtgtatgcatctcacctatctttttttgcttttttcaaataagaaagtattaaaaattaatgcctatacaacgttaaaggaggaacagacatggctaaacttgatttaaatagtcttgacgatgagcacgtaaaattattaataaatgaattaaaatatccagaaactcatatcgatgtaaatgaataaaaaacaatagttgctagtcgaataaatgaaaggcaagaaataataagttttaagttaggaataaagtacttcttaacaataaaaagggataacatagaaaaagataggttttcaatttcaatcattttcaaagatacctatcacaccctagttagaatagatattaacggtggtactcacgataatccagatggaacaatcgctccgaaaagtcatattcacatatataatgataagtgtgataaaaaggataggtttgcttatgaaattaacttgaaagatttccccgacatctataacttgtataatgtgtatatgtcgtttttagagtaaaaaaatataaaagaccttgaataaaggagggataatatgactacgtttgatgctaaaaaattaaaaaaagaatatcttgattggtataatcagattttagagttttctaatttatcaaacaattcagtaaaaatagataccccttttaaagataattctttagataatttaaaaatatacgctttatacgatcagtccagagacatgattacactgactgatgacggctatactatatttggtttagaaaataacggtgtttctataaataaatttaaaaaacgtaaaaagatttttgaagagcacctttcagcttacggtattaaatataacgataaaactcacgaaatttttgttcaaactaactttaaaaattttaataaatcgaaacataatttattacagtgccttatatttgttaatgatatgtacttactttctaatcctaagtcacagaacatatttacagaagatgttgcaaacaaattggatgaacataacatttattacggaagagatatacctattataggaagcagtggtgttgttcataatttcgacttttttattagcgctaagaaaaatcaaaaagaaaaatttatcaatgttttttctaaccctaataattctatgattattaagtcgaaaataacggatgctatgcaagcaaaaaaaataaaaagacacaggcaaaatgagtttatttttattttaaatgactcaaaaaaagaaataaatgaacataataaaaatcttcttcatgaaaactatattagtacaatagattatagcgaattagatgaaaagataggtttattgatttaatatttatagacgtgataatatcaatgtttatattaaatgaaacgaatttgaaaatttcgaaacagcttaagatagcaaattgaatagtcttatagataatgcagaatcgtctacacatagttaaacaaattatttgagaataattattgttaaactatgtggataggcgattttattttgacaagagtcagaagaacatatattaaggatttcaaattacaaatggctaaactttatgaaaatggtatgactagaatcgaaattatacgcgaatacgatttaacactctcaatcttctcgaactgaataaatactgggtcattcaatcattaagacaacttaataagtgatgatatatgttcataccattttgcaaatataaccagatactctcaacaaaatgtagagttcaaaattaaaaatgtcaacattatagtaaactaacatagtcccctgttcatattcttcaatctttaaatcttatcgaacaaataaaagcagataattttttaatttgaacgttttattttagaacaaaaaagagcaaggttaacgagtcagaaaatctttttcttgatacgtatatgacacttgctcttttaagaatctgaatatttcacgctatttccattaaattagcggagaatgaatgatatctttatactaataaatttaactttttaacgtataaaattaatgcattgtactaaagtttcaattattttataattgtatgaatgaatcgtatacacttaggtagtcaaatctaagaatttagatattgtttaattttaaaactatcgattcacatataaataaaaggagataacagcatgaggagattactcagtctattactagctagtacaatgattttagtcgcatgtgggaatgctaacaatgaaaataagaaaaaggaagacgaaaaaaaatcagaagtaaaaaaagaagctacgaaaaataatgataaaccaaagaacgaaaagaagaatcaagatataaataaaaacaataatgagcaagttcaaaatgtcaataataaacaaccagtcttaaataataatagtaatcataacaatcaacaacaaagcaataaaaataattacacagttatagaaaacgggaatacagttacagaaatttataatggacaatcacacacaactacaaataaccctattagagaagaatatgtagagggagaaacagacccgatatataaaagagagtataagcatttttatacacctgaagaagctcaaagagcacaagaaaatagcgaccaaattttaagagaaatgggtctcgaaccagaaagatatgaataaaatcaaactaaataatttcgggtagcccccctacccttattatttttttgctaagaagtaataattatatttctaatatgattaggttcgatgttaatggtagtgatcatgcaaatccaccaaataatgaaagaatacctacgccacatatacacatatatactgaagaatataataatggtggtattgcgatcccattaaaagatattgaagatttagaattaacagatgaaattatagaatcattagacttctttatgaagtatactaatataaaacacgataatgttataaaagaaccaagattactgtaaaagaaatggagggatacttagtgaagactatcgaagaaagaatgaacgaatatttcaactggttaaagcaaaattatatcttcaaagaattagatagttctacagaaattactactccctttaagaaccatttgaatgattttattagaatatatgctgatacactacctaataatgaaatttgtctatcagatgacggattgacgattaatgaattagaaatgttgggtattgatataaacacaaaaacgagaactaaacttatacagaatattttaaatcaatttaatttaaaattagttgataaagaaattacagcggatgttaaaaatgagagttttgctcagtctaaacataatttaattcaaggcatattgaaaatttatgaccttactttaactactaaatctaacgttacaaacatattctatgaagaagtatttgaattcttatatgaccaaaaaataagaggtttagcacaagtttctgtttctggagaatcaggtttaaaatattctattgattatattgtttctgaaacaaaatcacaaccagaaaaactagttaactttacaaacaacttagatttcaacaaaataactaatgaagcttatatttaccgtgatatcaaaccaaacagaccatccagaaacaaattagaacctatcatgttgataattgtaaatgatgtagatcatccgataaatgaaagagcacaaactgtagcagaacatgaaaaccttgagatattaaaatggtctaataaatcaaaaatcattgaaactttaacctcataaattagcagtagtcccttatttatattctttaatttccaaaccatatcgtgcaaatagaaaagcagataacttttttatttgcacgttttattttagaacaagaaagaacaaggtcaacgagtcagaaaaactttttcttgatacgtatttgacacttgctcttttaagaaaactaacaattcattgtatttccgttaaattaacggagaattcggattacctagatagatttacctctagagtgttaaaaaattgtacattcttaaacaatcataaatgtacgttattaaattatcatttccactggagaatcatgtcgactaaaagattataaaagtaaaaatacatttaaaagcacgtcattttcaaaccgccataaaacagcatttttaaaccgctattgacataaaatatatttagaataaatcatttagaaaaattaaataatttaaccggcaataaactaactatttacatgaatctataaaacacttagaacaaaagttcgaaaaacgcactttatgattgtatagtgatatcaaatatacttatcagtgagtattaagaaatacttccattttaatactcttagaatcaacaactttattatctccgtaaatatttaaaaacttatatggaacaaaaggtactagttcttttttaggaaataagtcaaaccaaaaacttgtattgttcttttcagtaaattttatatatccagattcaaatgcagaaccatcaaactcgtatagctttttttctttagtgagccagtgtcttgctttgtaatctagttcctgaatagtaaccatattcttatttgtagttattgtaaatccaagtgattgtctattgtcgattgttacctgtacagtaattaatttatctctttcattttctgaactattaaatgtaagaccaccatacatacaacaacctccaaaattttggtttatatccggttcagatttaggtattatacatgtataaaaatatggaacgccaaaaatgtctaattttttatctttataattgttagctaattctgtattttctaattcagttttaacctcattataactcttatactcaattggaaaaattaaatcatgagataaaaactgtctagaattaataactcctcttccttcaacaggtggagacgtataaagattcattacattacccatagttcccttattatttttataatcacttactttatttagttcgtctaatttaggatcgggttgagcattcacataattcatattatgaaaaactatttctagaatcaaaataataattacagtagataatttcttcataaaacctcctctaacttattcagtctatttgacaatgaaccttattataaattcacgcttatagatagttcaggttgtagtgtgtcgatagcattgttttaaaactaaaaattcactagcagaataaattaaaattctatttatcattattactaattacaacaaataattttgaatccgtattcaagataatatataaatttcaaattttactacaattcaaatcattttcctctcataaaatggtttaatttcatgattcagttgataatcatcaatcacttaatctttatataaaaatacatcaatatgataattagatgagctaactgttctattatcactataaaattgaaaaaactctgctcccactgaaccttttacgttatataaatcataataaaatgattgatcttgatgattatgagaatgaaagaaaatgcatcctttttgtatgttaccggtatctttattgtatattttatataaattttctaatttaaatcgaactttagtgtctaattcttgtactgttactttagcctttttggtttttataacaaaaccttcttgttggacaccatctttaaatacattaacgcctataactttctcttcatctaattgatttccatcatgtatcgtaactcctccgtataagcatgatgttttttcttcagttaagcctacacatttatttccaaaatacagtccataaatatctatattttttcctttaaattgatttgctaaatctgatgagttaaactcaactttcaaactagaagttttaagtacggatatatcaatattttttaatattatagtattattcagtagttgatctgtactaattttatttgactcgtctaattgccacgttatatcagtataatagcttgttaaattaaataacttactactatctagatcagattttttctttaaatcttttttgtctacttcagcattaacataattattattaataagacataataaagttattataattgcagctatgtagaacaatctcataagctttttaatattttttataatattctctccctcaattattttttggttaaatgaacttctacattaatagatttactctcaactgttttattatcattataaattagtaaatatttagtcggataaaattttttaccagattcaggcatcaaatcataccaaaaagaatgaccacttccttcgataaactttatatagccagtctcataaggcgaactgttaaattcatataaatttttatgcttaagtaaatagtttctaactttataatctatttcttgtgctgttatgtttttcttattagtaggtatatcaaaagataatgaatttctctcgttttcataaactttaattaagatattatgagagttatcagttgaattatttttatctatttgatttccatcatgctcggtcacaccgccatacatacacgtttttttcaattaatctaccatcatttaattccatattatccaatgaaaaatagcattgattataatagtttgtcccaaacaaatctacgtttttatttttatatttatccgaaaggcttttattattaaattctgtttttaaaattttagaaccatttattttaaataataaatcatgttgtaaaaacttttcttgggatttaatgtttgtttctgatacgtgtttatcatcatacaaatacctcatattatccattagaccagtgaattcactcgctttattcaattgttctggtttaggattgccatttaacataaatagtaagctgcaagacttaacacatatgaagataaaggcaaataacttcattacaacaactccatattttaattttttataaatttgatgtattacagggaatatttaacgtacacattagccctagagactttaaaatttaaatagttaatacatatattaatttcgtataaattcgcattttagtgttaaaactaattatcattagttactatctacatatgatatttcgacatcaagatgaaatttttcagattctattattttattatcttcataaattttcaaaaaacttacaggcagtccatctcctgtataaaacaaatcatatgaaaatgatttttcattatttaaatgaaataaaactttcccattattaaaacctgaataaaatttagatttatatccatattctttgcctttaccagtgttattatgaccatatatattgtattcttcttgaagatatcttcttaatttaacatcaatttcttgagctgttactagttttttattagttgctattttgtcagtagaaattgttttatgtttgccattaacccaaagattaatagggatttttctagcagaatttaagtattgtcctgataaagtggcccctccatacatgtatttagatttacaaggaccattataatcaatgccaaaaatatccagtttctttcctttaaatttacttatttcgtcccaattattagattctgagatcaaatcattggtacctgttgaaaattcgagttgatttgcaataggtaggtttttatctgtgacgccttttaaatctatataatcatgttttgtatagaaatttcttaagttacctacaccaatatcaccttgagcatacgtaagatctttaatgttaaaaagtaatataaaaactaatataaaactatatttaaattttttcatggcatttcctttactaagttatgattgaaatacttcaactttcgtccttataagatatttctacatctaaatggaatttttcagtttcgacagttttgttgtcattatatatttttaagaaactttcagcttgtcctgttccagtatcaaataagtcataagaaaatgatgaaccatcattcaaatgaaataatatttttcctgcattaaatccagaactaaattttgacttattaccataatttcttcctttatttgtatcattaaagccataaatattatattcttcttgtagatatcttcttaatttagtatcaatttcttgagctgttactaactttttattagttgatactttgtcagtagatatagtttgatgttctccattaacccaaagattaataggaatacgtctagatttctctaaataatcacctgctaatgtaactccaccgtatatatatttgtttttcaaacaatatccactataacttagaccatatacatctacagcatgatttttgaatttctttacatcatcaacgttcttaaattcagctgttactgtcgaattatccatagaaaaaactaattgatgcgaaagatgattattttcaggattaatactttggtggtcttcaattggatagctaccataatagttcctaagattcaaaactccgacatcagcggttgcgatatgattttgcgaatagcaaaacaataaaacaacaatgataagtattcttttcatattttatttctcctatatttaaacttctctatctttattatcttttattgtaaaaataaccaattcttcttaaatcatcatgattctatcccacttatatattattactcgttaatctggttttgttatctatactaaaatagaaagctttttatagtaataaagttagatttgaatcactattcgttcttcatcatttactaagctactttgtaaaaatatgttaatatctatagttctttataggattgtaagttgatatccatcaactttcagattgttatgtaaataaataaacatcaatatgatagtctgatgaatctattgttttattatcattataaatttgcaaatattgatctggtaaatttcctttaatataaaataaatcataataaaatgattctttatgctccgaatgagaatgaaatttaatataacctttttgtacatcactagtcattctgtcatacaatttatatgcattatttaattttgttcttactttaatatcaagttcttgtgcagtaactttctttttatctgtagtaacgataaatgtattaacatttacattatccttatacacagctactcctatatttttaggctcgcttaatttattattttcatgaggtgttaccccaccatatgtacaggcagtatccacttgatgctcaccatgacaatgtgctttatagtaaacaccataaatatcaacagtctttcctagaaattctttagaaatcgctgatgagctaaattccacttttaaatctttaaattcagcagatattccatctaaccaattaatacttttaaataataaatcgaagtctaagaatttttctgtagttgatacaattgattttactgtcgtaaatcgattatttatataatcatcattaatattatgtaaagcaatagggtctacacttgacttcttacacaaactctctattttaggatcttcttcatttgcatatgcattgtttacactacatattgcaattaaatttaaaattaataataatacatttaacattactttactatttttaataatatccctccttcacaaaatttttttcttaataaactgaaaaattctgtttttaatctttaaatattcactaatattattagattacgattttaaacttaacaatcctacttactattgaacaaacaaattttaaattaagtgactcagataatagacaaaaaaccttaaaaatagcgcttaaaatgggtaaaaccattttaagcgctataacggagagtgagggattcgaaccctcgagacgcttgtggcgcctacacactttccaggcgtgctccttcggccaactcggacaactctcctcaataataaatatgtaataaaaaaacagaagcgatatttcacttctgtttgtatgactcctacgggactcgaacccgtgttaccgccgtgaaagggcggtgtcttaaccgcttgaccaaggagccatggctccacaggtaggactcgaacctacgaccgatcggttaacagccgatagctctaccactgagctactgtggaataataatagaaaataatggagcgggtgatgggaatcgaacccacaacatcagcttggaaggctgaggttttgccattaaactacacccgctaatgtaaacgattatggggcggctgaaggggatcgaaccctcgaatgtcggaaccacaatccgatgtgttaaccacttcaccacaaccgccatgaattaagaatggttcaggacagagtcgaactgccgacacatggagcttcaatccattgctctaccaactgagctactgaaccgtaatggtaataataatggcggtctcgacgggaatcgaacccgcgatctcctgcgtgacaggcaggcgtgttaaccgctacactacgagacctattaaattaaaaactatgtattgcgggaggcggatttgaaccaccgaccttcgggttatgagcccgacgagctaccgaactgctccatcccgcgctaatattattttgaattacctaattaatataccatatttaaaaacctaaagtcaagaacttttttaatttaatttaaatattatttcttaaataattacttaaatatcgtagcaacatgttctctgttgaacacaaatattagtatattcatttttgtagtgtacgtcaacgacattttgaaagttttttgtgtaaaaaaacgcttcttcttcccttttataatataagtgtctaatagttgtcataattactcatgaactattgaaaaagatgtaggaatcataaattttataatgcctacacctctaaactattaaaatataattataatctttttcactaaagtgctatgcttcgtactgacacacataacacaatacatagcaaccaaacattacctatcgtgtcatgtaatcttgcatccgatcttgcaacgctgtaaatgtttcgaagccatcctcttctaagaagtgccctccatcttccacgattcgcaagttcccctctaatgcattcattaaacgctgggtttctttatatgaaacgtatttgtcatttttagaactcaatccgtaaaaattgtcaactttctttttaatattatcgtaatcaatggttacattacttaaatcaatatctaaatctatattttctgcatcttctttaaagcccgctatactaaaaaagccttcaatcggctgatcaatcatttcaatatattttaaagctgtgattgaacctaaaccatgtgttacaaaatatgtatcctttttgcgtacattaatttgtttcgtcatagcttcaatccactgatccactgtcttcgcttcaggggattcaaaattaaataatgttacgtcatatccttctaaagttaagttatgctccaaccactgataccaatgatttctactatttccatgcatagaatgtacaataattacatctgtcatctcattctctcctttcaacttactacttcttttctatttttaaaaaaatgactgattacctataattgtaaaataaaaacaccttaattagaaatgttatatcgcaaagtgacatttctaattaaagtgtattgtcatcatttcaatatcattcaaaaacagctaaacctttgtctctgcttcaatttcacaaaaataattcccgctgaaagtatctatatttacacattacttccaccattatataacttaaaaatgactatatttcatcaaacattatctaaaggcgtcgcacctacaccaacaccatccaacaattaacttacaactctgcgattacttcttcagcagcaactttaccttgtgtaatacaatcaggtagtccaaccgcttcaaaagatgcaccagttactctaagtcgtggatatgtttgtttaatatgtgcttgaatctgtctaatttgttgaatatgaccgacatggtactgtggcatacttttcggcaaacgattgacaattgtaaattcaggatcacctttaaatgtcatcatttgacttaaatctctacgtacaatcgatactaattcattatctgtatgatcatcaaccacagtatcacctggtttacctacatacgcacgaatcaaaaccttaccttctggtgtagtaaatggccattttttcgatgtccaagtacatgcggtaatgtctgtatcactcgttctcgcaatcacgaagccagtaccatcataagtattttcaatgtctttttcatcaaatgccaatacaacagttgcaacagtcgtactatccatcgttttaaagtaatcaaatgctggatcttgtccgaaccaattcaaaaagacttgatgcggtgttgtcactaataccccatcgaatacatcttcttgttgattactgtaaacaattttatattgcttttgagatgtaataatatcatccactgacgtattgtagcgtattgtcacacctttatttttcacatcttgttctaatgcttcaataaatgagcttaaaccatgcttaaattgtttgaattgtccttttggtgcgccaggatataattgtctttgtttcagacgcttatttttctcatccttcataccttttatcagacttccgaatgcctcttctttttctttaaaattaggaaacgtactcatcaaacttaatttatcaatatcggtaccataaataccacccattaaaggctcaattaagttctcaagtacctcattacctaatcttgctctgaaaaatgcaccaacagaaatgtcaccatcttgcatttgtataggctttttgattaaatctaatcctgctcttaatttaccaagtggcgatattaattttgtagtaacaaatggtttaatatctgttggaatacccataattgaaccacctggaatcggatataatttatttttcgcaaaaatatatgattgtccagtcgtatttgtaacaatatcttgttctaatccaatatctttcgctaattctgtcataatcgtttttctacctaaataagattcaggccctagttcaatcatataaccatctttacgatacgattgaatctttccccccggacgattcgatgcttcaaagatggttacatcaatattaggatcttgctgttttaaaaaatatgcacttgataaacctgttatccccgctcctataatagccactgatttagtcacaacgtttcacgcttctttcgtcattaaaatatagacttgatttcatcaacaattgcaccgataaataatggatgtgtattcggcatttttggacgataataattcgcaccaatatcatcgcaaacaactttacattcataatcattgtcataaagcacctctaaatgctcacatacaaaacctactggcgtatatataaagtttttatactgatgtttttcatataaatcacgtgttaaatcttgtacatctggccctaaccaaggtgtacctgtattaccttcagattgccaaccaatcgcgatatgttcaatattagattgttctttaattaaaagcgcagtatgttctagttcttgtggatatggatcattattcttttcgattaaaccttttggcaaactatgtgccgaaacaactaataccgtgtctttatgttcctcttccggtatttgagctaatgtttcgttgactttattcgtccaatattcaataaatttaggttgttcataataatgtttcacatgtgtaagttgaataccatattttgcagcttcttcatcagcacgtttgtcatatgatcctactgaaaatgaagaataatgtggtgctagtactaccgtgattgcttcagtaataccatcattgtgcatttgttcaaccgcatcttcgataaatggtgaaatgtgttttaatcctaagtatagtttaaattcaacatctgcatatgctttatttaatgctgaaactagtgcatcagcttggtcatctgttgtacctgctaatggtgataaaccacctataaattcatatctatctttcaaatcttgaagttcttcttcagatggacgtttaccatgtctaatatctgtataatatggctctatgtcactttctttataaggtgtgccataagccataactaataaccccatttttttagtcattgataataccttcctttaaatgaattatctttcatgtgcttcaatgtaatactatgattatctttgtgtatatgtgtgtacgaattcgcttactttacgtaacgtctctggttgcacttctgggaaaacaccgtgtcctaaattaaagatgtgtttaccgttctccataccttgatctaatattggtttcaatctctcttcaatgacattccatggtgctaataaaattgatggatctaaattcccttgtaatgttttagtaacgcctaattgttgagcctgattaatagacgttctccaatctaggcctaatacatcaatcggtaaatcattccattcattgattaaatgactggcacctacaccgaataaaattaccggcacatcatgtttttctttaacctcactgattaatcgaatcatatgtggtttaatgtaacgtctgtaatcctcgacatttaatgcacctacccatgaatcgaaaatttgaatcaattcggcacctgcttcgacttgagctgttacatatttaacagatacatcaactaaatgattcattaaagcaaaccatgttgcttcatctctatacatcatcgcttttgtaaaattgtaatttttcgatggtccgccttcaatcatatatgacgctaatgtaaatggtgccccagtaaatcctattagcggcacatttaacttttcttctgttaaaagtttaattgtatctaatacatatggtacatctcgttcggggtctatttgagaaagtttctcaacatcttgaattgttttgataggattatgaatcactggaccaatacccgatttaatttctacatcgacaccaattggctttaatggtgtcataatatctttgtataaaattgctgcatctgtatgataattatcaactggtaaatgtgttacataagcgcacaactccggctgatgtgtaatatcgaatagtgaatatttttctttcaattttcgatattctggttgcgaacggccagcttgtcgcataaaccaaacaggtgtatgtgatgtttcttcacctttgatcatttttaaaattgtattgtttttattatgcaccataaaggcctcctaaattaaaatcattcttatctatattatcatatcgctcattcgttcgtattttcaataaataaatgtcataaaactgacatttaatcatagaactatttattgtaaatttaaattctaaagtccattattttgtatcattacttctaaatatctcgcaagattcattatagtaattttaatcaattattaatagtggtaatgactagtttatcatcgtataataaataaaaacataagggggacctttcatatgaagaaactatatacatcttatggcacttatggatttttacatcaaataaaaatcaataacccgacccatcaactattccaattttcagcatcagatacttcagttatttttgaagaaactgatggtgagactgttttaaaatcaccttcaatatatgaagttattaaagaaattggtgaattcagtgaacatcatttctattgtgcaatcttcattccttcaacagaagatcatgcatatcaacttgaaaagaaactgattagtgtagacgataatttcagaaactttggtggctttaaaagctatcgtttgttaagacctgctaaaggtacaacatataaaatttatttcggatttgctgatcgacatgcatacgaagactttaagcaatctgatgcctttaatgaccatttttcaaaagacgcattaagtcattactttggttcaagcggacaacattcaagttattttgaaagatatctatacccaataaaagaatagactcgaagaaaacttccattggttatgctgttaacgtatagatgctaatgtaatctgaacgccgtatcatttggcgttcaacattacatgcacctttacaacatacatgccaatggaagttttttagtctcgtaataatgtttcctgatatttcaactttttaataatacttctaatcgttaataaacctacaatatagaaaatgagtacaacatagaataacgtcatatgttttataataaatgtcactgcaaacacagtacaaataacaaacattaatctatataaaaactgttcataccctttgattaccttctcttcaggtacaggccacacttgaggccataagccatatgcttgttgtgaataaaattgtgccatttgcaacaatataatatacacaaaaagacttccaataacccctgtcactaatggatatgataaccaaaccataagtaaaactgcaataattactaacctaaagataatattaaatgcgtctctccctcttataaagcttctaataaataagaataaatacatcgcattagagttaaatttactaccctttggaactggtaaaagtatatctagataacttcttctgactgcagattctttcaaatgttttacatcggtgaacatattaacaaatttataataattcatatgatgtcgatgttcgatagcaatcattttctcccaaggatacaaaaagcctggtttatattttttaactaaaaattctattaacacaggcaaagcaaccatcacaaatacgatgtaccattttggagctaatagtaagtaatatgttagagcaaagatgataaatgatattaaattaacttgccatgttttaagtcccgattgataccattgccatcttaagcgtaaaccaacatatggaaaaattaatgcactgaatccaaaacaaatataaaatgccacattatgttgattaatattgtaaaacaacgggaacattacaataacaataatgagttggattaatatgcgcgcaaagtaactatataaaatcgcatggcgcataaattgagacatgtgtttttcaaatggtaataaaaagattttatccgcttcttttaggagtggtcgcattggaaaaatggatgtcaacgcaacaatcactgctgctattaatgcaaaattgatattcgttggaatatgttttaaccattcaccatatccaaaaataaatgcacccagcaaaataagtaaaaagaccatgaaatgaccattaaatataaacttattataataatttttctctttacgaagggcatgtaatcttttattaaataatgtggtcgcttggttatgcatgtacatctccaccttgcgtcacatgaatatatatatcgtctaatgtttgattatgtaagccagtttgttgtctcaatgcttctaaatctccaaatgcaacgacttcaccttcgtctagtatgataaaacgatcacaataacgttcagctgttgctaaaatatgtgtactcattagaacggttctaccttcgtttttcttttcaaccattaaatctaacatggattgaattcctaatggatctagtccaaggaatggttcgtctataatatacaattcgggattaacgataaacgcacaaataatcatgactttttgtttcatccccttagaaaaatgactcggaaaaactttcaattcattttctaaacggaatgtctttaataatggcattgctcgattcatcgcttcatcacgatcaatatcatatgccattgctgtcatctctatatgttcctctaatgtgagttcttcataaataaccggtgattccggaatataagataactttcttctatatgcctctatgtcatcattaatgttgatatctgaaattgatagagatccttccataggtgtaagcaatcctagcatatgtttaatcgttgtactcttaccagcgccattaaggccaataagtccaacgatttcgcctttgtttaattcaaaatttatatctttaattacagggcgttttccatatccacctgtaagctgttctactttaactgtcataaggcacctccatgacttatattgtaccaaaaattataaaatgctcatattaaatacacatgtcctaatatcgaatttttagcgacaatgttataatgaatggtaatactagttgaaaaggagtgtagtcatcatgtcagaaacaattttcggcaaaattttaactggagaaattcctagctttaaagtatatgaagacgattatgtctatgcctttttagatatatcacaagttactaaaggacatacgttattaattcctaaaaaagcttctgctaatatctttgaaactgatgaagaaacaatgaaacatatcggtgcagcattacctaaagtagcaaatgctattaagcgtgcatttaatcctgatggtttaaacattattcaaaataatggtgagtttgcagatcaatctgtatttcatattcatttccacttaattcctcgatacgaaaatgatattgatggatttggttataagtgggaaacacatgaagacattttagataacgatgcaaaacaacaaattgctgaacaaattcaagcacaattttaaatgtatgcttaatctaagctcgaacgggtataatatgattaatattataacaattgcgtttgaagtgataacatcaaggttagcaattttaaacaaaatgagttatcaagataacagatgttaaaagtgaggagaatataaatgaaagcatcacgcattctattcggtatcggtgttggcgtagcagctggttttgtagttgcacttcaaggacgagacgacaaaagtgtcaagaacaacacgatcgatcgtactgcccctactggttcaaaatcagaactacaacgtgaatttgaaacgattaaacaaagttttaatgacattttaaactatggtgttcaaattaaaaacgaaagtgcggaatttggtagttcaattggtggtgaaattaagtcattacttggaaacttcaaatctgacattaatcctaatattgaacgtttacagtcacacatcgaaaatttacaaaatcgtggcgaggatattggaaacgaaatttctaagtagcacgttacgttctcgatcacaactatttttattagtaacagcatatttatttttttaaattaaatgccaaataaacgagatgacattagaaattagatatttcttgtcatctcttttttataactcaaatgaacttatgtttacaaattacaggaatacatcgtttgtagtgattttcgcttaaatcatatttatgaattgattgaaaacattgcttaggattcattgtgttatccttgcactttgattacgctttacttatatcattatcgacaaacaacatacttatattttcattgagccgaaccttatatacacattacatataccttacttgcacaaattattaatctggtatttattataattacatatcactatatttttagcatttgtataacttagttggtcaaaagatgcttttgcatatgccctgccatatccattttttatattattcaagttttcaaatactcatgtcacacgcgcctttttcataagtgatgctttattagcaagaagatgtgttcgcagaaatttgttctgcattctacttctacgctagtcaatcagccaattttaccaatctccactttcgcgtttcaaatcaaacaatacgtgtctcccctttcttcttatataacaattcttctaacatgatatgttactattgaattactgaacctgagttagttataatctaacttatattgaaaagagatgaggcgtaagatatgtttttatgtaaaagacaaattgatatcaatgcacgatttggtttgcctagaattgcatttatgagtgcagttgcaaccatcattatgtttttagttagttatgaagtaatgtattttttatctaatacgccattatcagatagacattttctcatctttttattacttgtatttatgacgtatccattacataaaagtatacatttattatttttcttaccatatagaaaatcgtttaaagttcataagttaactaaaagaaaatggcttatattctataatacctacgtcaatcaacctgtacacaaattttatttttgcattaacttaatattgccgttaattatcttatctgcaatgttcgtttatctaacaatttcattcccgcaatatggacattattttatgttcttattggcattgaatttcggtatttccattacagatttattatatttaaaaataattatattttctaattatggacaatatatagaagaacatagtacaggtattaatattttgaaaaaaattaaaaatccatatcatttataacaaaataattatagcaaggtgttattatttgtttttaggctatgtaatagcttacaatcaaatgtatatagaccttgtttttttattttcatcaatttctacccctaaacctaatgctctagtctgatgtcatgggttattgattggtgataatataaaactatgttatattcacgatgattaacttacaaaggagtttcaactatgaagatgataaacaaattaatcgttccggtaacagctagtgctttattattaggcgcttgtggcgctagtgccacagactctaaagaaaatacattaatttcttctaaagctggagatgtaacagttgcagatacaatgaaaaaaatcggtaaagatcaaattgcaaatgcatcatttactgaaatgttaaataaaattttagctgataaatataaaaataaagttaatgataagaagattgacgaacaaattgaaaaaatgcaaaagcaatacggcggtaaagataaatttgaaaaggcccttcaacagcaaggtttaacagccgataaatataaagaaaatttacgtactgctgcttatcataaagaattactatcagataaaattaaaatctctgattctgaaattaaagaagacagcaagaaagcttcacacattttaattaaagttaaatctaagaaaagcgacaaagaaggcttagacgataaagaagcgaaacaaaaagctgaagaaattcaaaaagaagtttcaaaagatccaagtaaatttggtgaaatcgctaaaaaagaatcaatggatactggttcagctaaaaaagatggcgaattaggttatgttcttaaaggacaaactgataaagattttgaaaaagcactatttaagcttaaagatggtgaagtatcagaggttgttaaatcaagctttggatatcatattattaaagctgataaaccaacagactttaacagtgaaaaacaaagcctgaaagaaaaattagtcgatcagaaagtacaaaaaaatccaaaattattaactgatgcatacaaagatctattaaaagaatacgatgttgactttaaagatcgtgatattaaatcagttgtcgaagataaaatcttaaaccctgaaaaacttaaacaaggtggcgcacaaggcggacaatccggcatgagccaataacacaaaaccgagcgaccgtggttcaaaaatcataccacggccgctcggttttttcgcattaaaaatcggacagaggagctcatgtttcagtatactcatctgtccgatatcttttaattcttaatcgagtgattcaggattgtagaatctacgattttcaagaccaaatattttatctgtaaactgacccttgtcagtttttttataagccttttcaaacatattcattctagcatcgatgttatcgatatagcataaaatttctgcttcttttaagtatggcagttttggcgaaccatactctaacttaccatgatgagataaaatcatatgtcttaacaacatgatttcttctccttcaatgttcaattcacgagctgcttcaactacttcatcactcgcaatcgagatgtgtcctaataagttaccttcgactgtatacgacgtcgcaacaggaccactcaattctctaactttaccaatatcatgcaaaataataccactatataacaaacttttgtttaacaatggataaatgtcacaaattgattttgcaatacgtaacatcgtcaatacatgatagcttaagccactcgcaaagttatgatgatgagaactagcagctggatatgtgtaaaatcgttcttgatattttttcaataaatgacgtgtgatacgttgtaaattagcattttcaatatctagcaaataatgagaaatctcttcttgtatttctgccggtgataaaggtgcaccatctacaaattgttctgtttttaattgatcttcagttgtcgctagtctaatttggttgactttcatctgtttatttccgcgatagtttatgatgtcacctttaacatgtacaatttcttcaggcttgattgttgccatatcattttttgtagccgtccaaaatttcgcttcaatttcaccacttttatcttgcaaatgtaatgtcatataatctttaccttgtgctgttacaccctgtgtagctttatgcactaagaaaaagtgatcaactgaatctccgggatttagattctctatatttctcatcgtttcccgccttcctctattttgtttaatgtaatcacttcttttgatggaacaatattatcttttacacatgtaaagtatagtacttgatagtgttctgataatgatcgtaaataattcaacattttttcagtacgctttttatcaaaatgaacaaatgcatcatcaacaattaatgggaacggataatatggtcttagtaccttaattaaactgatacgtaaagctacataaagtaattcttttgtagattgacttagttcaacaggatcatataattgaccattaacatgtttaaccgtaattgaatcttcattatagttaatcatcgtatatctgccatctgttaaatgcttcaatatttctaccgcttcattaataacttgaggcaaacgtttatctttaatttgtttaatgtgttcatcaactaaactttgtaaataacttaaacttgcccaatcttttgcgatatcattaagttgatttttaagactgtgatattcatgtcttaaattagcaagcgttgtatcagtttccatgtgattgatttgtgcacttaaatcactgacttgtccttgcatttcaagatattgctcattatattcgtcaacttgagtagccaataaatgatcttcttcttcaagttgtgcagttgttttttcacttaaactagaacttaattcataagaatagttttggttctcaagatatttagttaaatcattaaaacgactcaaattactagtataagtttggtaatcttcatgatgttggtaaaaatcttcttcagtaccaacattgataaaatcgaatagtgctgtaatttctttattattttcttctaattgagcatttaaatgatttaattcatttgtaacaagtttggtattttcagcattaatacgccatttttcattcgtgtcttcagctgatttcaaccattgttgcacatcgtggaataaagataatttgttgaaataaacaaattgtgattttgtaacagcttcagcatgattgtagaatgtatctaattcttgaaccaattgctggcgttgttgatttaaatcactgatatgttgatctaatgctttaatattcgccattgtagaaatactatcaacaattaaatcatttgaaattttagatgataagtataattcatccttaacgttctcaactgtcgattgtaattcatcatgacgccctttcgcatcatttaaacgaccttcaatatactgacgtttctcttctaaaatatctttatttttcaaagcttgttgccagtgatcacgaatgcgatattgctcatcaagatcaaaatctaagtcataattttcatctaaaatggctagttgtgctttaatttcttcgatttcatctgtgatggcctcgctataatctacttcttttgatttagacatgatgataccgataacaaatactaaagttaatactgcgaaaataataccaaacaacatgttgtttgaaataaatgagaaggcagttaaaccaatacctactaatgttaaaagaataaacgttgttcgtaacaatttttgacgtttttgtttttcttgttgctcaatttcgaaacgttctttcaatttgctatacaagttctctttttcgtttaattcaatgacttgttgtgagtattcttttttcttttcaaaagtctcttcaggaactattttttcttcaacagaatctagttcgctatgaaccgcattatcttcgattttattttcttctaaactacgttctaattgtttaatgtatgcagcttgttcttgtttattcttgatttgctcactgacataacttttcattgcctctgaactatctacgtcatgatgcgtttcagaccaaccaatatttgcttgcaattcatctttatcacgttgtttattcgcaatatccttttcgattgcagtaagttcaaattctttatttttaatttcattttcttgttgattcaaactaatgaaggcgtcaatatcagattgtttaactggctctaattgagtcgcttcttctttaagttgagctaaacgctcatttcttaaaccaatatctctttctaacgattgcttatgcgctcgcgctttttcgtaacgatccacacctttttctgggaatgtgattggctcaatatttaactgttgttctagagacttccattcttgtgaatgatcatgtaaagcaacctctttttgtttttcttcatgcatttttgataattgatttaaattatgctttaaattctctaatcgacgtgatgatttatctcgatcatctactaagcgatgatatgtttctagctttgcttcttcttcacgaatttgactttctagttgttttaattgctcaatttgttgattaatgatcggatttttacctgattttttatataattcatcttttttacgattaatcacttcgcgcattgacgtgaattcagttgatcctaaagcccctgcttgtaataaataatcttgcaattgtttttcatttagatttctatgaatgtcttgaagccctagtacatcaaatgaaaagataccttgatatgtctttttagaaatataattaagtttcttttgtaaccaagcatcatcacgcacagcaccattaggtaaatatactttcacatcaccttgagcactgcctttaattcgttcaacttcaatctctaagccatcatcaagaataagtactaatttaccaccgtattggttacctagacgtggttctagtcttggctctttagactttttagttggaaaaccaaataatatcgaatggatgaatgcttgaatcgtcgatttacccgcttcattttcaccaaaaatttcagtgaagtttttattaaattcaattttacgttgaacaaattgaccgtaaccataaatttcaagtgatttaattatcattttgttcacctctcatttcagcttttaatatttcttcagcacgattaactaatgctgtatggtcgaatgttccataatcgtctaggaacttagatgcccttggatttaaatataaatctgacatcgctttatcaaaaacagtttgatcgactaataattccgctgaaaattcattaactaaaggtgactcatcattttgtgcatattgtatttttaactcatcaatatatacaaattgattttcgttttcttcataatctgtaatcatttcttcaacttgtaataaatcttgaggtgaaattaatgtctcactattaataacaagcgttaaacgataaaaggcttttccttcttctctcacttgttctttaaagttttgaatgacctcgtataaaccttgcttagatgtcttatccgtttcaatagttgcttcttcaaatctaatatactgtgtaggataaaatttagtctttaattttaagtggtcaccctcgattaataagcaacctttttcaccttgctcattaaaatgtctaccttgaatattacctgaatagttaattacaggcatatcacttaattgttgacgttcatgtatatgacctaaagcccaataatgatacaatttactgtttaaatcttctaaaatgaactcggtatatctttcgttaactgaagatttactatacgtaccatgcaagacaccaatatgtatgcctttttggccttgacttgatggatattcatcaatcttgttctcataacttgctctattttcataactaaatccgtgaatataaattgtttcaccagatttagtaattgcttcatacgtctcaactttatttgaaaatacagaaacattatctggccagtttgatgaaatctttgatgataaaggatcgtgattaccatgacaaacataaacaaagatttgttcattttgtaaacgttcaaattgctgttttaagaaaatttcagcacgtaatgttctgttttcactatcaaataaatcacccgcgataattacaaaatcaacatcttgttgtaatgcaatatctacaatatttttaaaactttcataagcacttttttgaacatcctcaaaaattttagggcttatatgactcttagatttgaaaggactatctaaatgtaaatccgaacaatgaataaatttaaccatacatccatatctccttaattaaaggttctaacatcaattttgcaaaatccaactatacaaagcattctaatcactatattcatacttataggtgtagtgattcattagctgatttattaaaaccagtcgccatttttatttcgttaaaaaattattatctacacaataataaagtgctttagtcaaatcgtgatgttttatttattaacaagtttattatttcttcattttaccataatacgcttcatatcgtcgatgaacatatgaaattgagacacatttataacagtttaaaattttatttgtagcgtgcgttgatttttttcaaaaatttcagtcggaaatgcaatttccgtaattgttaacaccgctagtgaaccaactgacacattaaagatttacatgattactctactagatttgctcggcagtaatgaccaattagaaactaaatgtcaaaactatcattgcacttaatacgccaaacattttcaggccgttcttaatgagtcattaaaagtgaaacgcttttccatcagtccgatacatgaccgaactaatagtattatgttgaaaactttacacttcaaaatgcaaaaaggaagttaggacacgtttactagcctaacttccgttactgaatgcatctgcccaatttgacatagaacctctaacttccgttatcaagctcatctgcccgttttggcatagagctagccatgtttgattgtccagcttccgtcgtccattctgagctaaagctaggacatgtttagtagcctaaattccgatagtgaacgcatctgcccaatttgacagagagcctctaacttccgttatcaaaactaaaaaaactacccacaaagtctcggactctgtcggcagtctattcctctatttaaaggattgaaaaatattattttaatattagtcagcgtaaatttcgtctaatggtttaacgataatttggttgatttcttggaatacttgactcattttttgttcagcattcattaatgcagagatgttttcatctttttcaattgcttgcgcttgttcttgcgctttttgtaaatcttcttcagcaatttcttcaccttgcatttgtttttgttggaagttaatttgagtttcacggaactcatcgaataactttttagattcttcgttagcttttacattagcgaatgcttctttgattgctttgtattcttcgctttctcttaaagcttgttctaattgatttgcataatcatataaatttactgccatggttatagcactcctttgttgtgatgtttattaaaacgttcgatattactttaccacatctcgcttttttagacaaagattgcaaccaaaccttggaaaaatccaataataccacctaaaatgaaacctaatgacataatcaactttagttctttgttagcaatttctataattaatttttcaatataatctaagtcaaacgtattaatttgttcttcaattaatcctcgtaaatccacttttttcataattgtagataagtgaatcgataatttttcaatgattaaatttgctaatttgctagagagttgaccttctaaataatcaacgaattgaggcattaacgtaaccactggcttattcgcttgattgcttgcatatgttgttacatacactgatagattttcagcgatttcattaaactgcgatgcatctaacagttcattcaatggtttatctttaaaagtttgatattcattggtaattaacgatgtcacaattgttcttgctttaggatgagatgttaaacgtataagttcttgttgaatgcgatctgcaatgctctcttttgtcataaacatttgcaacataccaattaacttacctttctcatggaaaaaagtatccaacatatcattaatatcttgtgtgccttttgcagatgataaataattccttgcacgatcacataataagtctgttgcgttatctacatgctgatctaaaaatgttacaagttgatttggcaataaagatgctattgtttggttttgatgctttgtataataattattcaattgtgattcaatatattgatttccattagtttgtaatacttgttctaaatcaatatcgatttgagaagtaatttgttttattgacaattgatctttcgtcaacttttgtaactgctgttgaatcatagattctattgcttgctgtgattgctcgctttttaatttttcattaattaaagtttctgtaagcaaatgctcttcaatcacttggccaattttagttgcaatttcttcgcgtcttttcggtattaaacctggtgtaaatgggactctaaatttaaatatatagtatggtttaaaggggtgaaacagcattctaattgcaattacattagtaatgcccccaattatcgcccctactacaatcataaatatgataataaatagtgcattcataattttgactcctttgtgacaacatagttattcattataccactatttttattttttaattcattaatcatttcactttctgctcaatttattattagtttacatacaaaaagcgatgcctcacctctcgaaacaggtgtgttacatcgcttttattatttattaaaagtatataggcctagatatgtactaattcttctttagcatttctgttaaagtatgtttcagcttctctcattttagaagtaccgaaaattggttggttatctggatttaatacacgataaatattgcttactttgttactttgtaaaatgtacccattacgagtctcaatgttattccaataaatatcacttgttggtgcatggtttggatatgcacagtgatttcttgaaattgtttgaacgatttctaatggatcacagccaaatgtactgtttaatacttcagagtctctgaataatgcacaaattgaaatacaagttgtccagtttggtaatactctctctttttcgatttgtactaaagtctttttagaaagtccaattgtttgcgccatagtatcttgcgtataaccagcctctatacgaaccattttaaattttgtttgaattaaatctgtaaaactctgtctatccattctgttatctacctttctgtttggggaattttatccggacacaagaaattgcaataatacacatttcttgaaacacagattacatcttaatatatttttaataaaatgaaaagagtcaatttcacatttgtattaaattttgatcaagtcaacaagagttaagtttactttataatgaagcgaaagtaaatgaagtaaaattttatgcacaatcactagatttgataaaacttacacttttataatgatatcaaatttacaaagaaaactgtataataaaccctatcgctataaaaaattcatcaaaatcagattaaaaattgtctatttttcgacaaatatttaaaagctcattctaaatcaacttattttccattgcataaattgctgcttgtgtacgatcgctaacttgtaatttactaaatatatgactgacatgtgttttaattgttttttcagatacaaataaagtttctgcaatctctttatttgttttacctttaaccatttcacgtaacacttcaatttctctctttgacaacttattcgtgtagtgtggtttttggctaactgtttcgaatacatcttgtgccttaggatgtatcattttttcaccgttcataactcgtctaatagtttcaattaattgctgaggctcaacgtctttcatttcataaccatcagcacctttattgattgctgaaattacatgttcatcatcaacataacttgttaataccaaaactttaatttccggataatgtgccttaatatattccgtaatttcaataccattcatgccaggcatcactaaatctaatagcacaatatcagggtgctcatgctcttttaaatattctaaaaatgtttctccatctgcaaagtcttgtaaaacttctatgttttcaatcgtggataataaaaatcgcaatccttgtcgcacaatataatggtcatctactaatattactttgttcatgggttatctccttaaatcaagctattttataggaattgtgaattgtatttgtgtaccctttgttggctgagaatgaaaggtcactttacctcttaataatttaactctttgttttatgttattaataccgtgtgatgaagctatctgaacattatcgatctcaaatccttgaccataatcaatcacgtcaatatatagtatatcgttcatttgttttaatgtaagatccattttattcgtatcagcatgtttcttaacattattaatacactcttgtaatgctctatatatgttttcttcgatttcattagataaatcgattaaaccttctacatttacatttaattgtatatgcattaatttactatatgctgtcaaagcatgaattaaaccttgctcaagtccaactggcttaagttgccaaatcaatgcacgcatttcattaacggcattttgactcgttttctcaatcgtcttgaatgcttgtttagcgatggattcgtttgacatgccatacgcagcatgtgctgttagttttacagaaaataacatttgatttactgaatcatgtaaatctctagctaaacgattacgttcattaatttttgctgcttctttttcacggtctgttaaataaatacgtttgatggctgaccctaattgaaatgcgacagactctagcaactctaaatcttcatcactatatatttcagtatttggggacgctacatttaaaatgccgaattgttcttgacccgatttaagtggtaccgttgcatgatgtgtaatattgtcattttggctaggaaatgctttagaggctaagttaatacgagaacaattgacgatattcgacgctttcattagcctacgttgattaaatgctttcacacaccaacaagacccatctttaatatagtgacagtggtctgctgtcaaagattgtggtagagccacatgtgatacaagttcatgttcacctacgctattgatgaaaaatatccagcctgtcgtgaaattactgccctcaattaaatattttaacgcaccttgggtcatgctatacatttcagtttcttcgtttaaaaattcggcaatctcttttaataaagctagtcgcgtcctttgttccatcaaatcgctccaattcatttttacgtgtattaactattatacattgagttattatatttttaaatcttagacgtgaacatgataaaatggccttgattactcaatagttatatttaggagaactgatttgtgatatgatattaaagactataggaggattttatgaaatttaaaataccagaaaactttaatgacttaagtttacgagatattttccaacaacttaaggtacctaaaaaagatttacatcatttaaatatgtctaaagatattactattaatgataaacctgcgcgattaatggataaagtgcatactggcgacgatgtatttgttccaaccatcgatgaaaaaagtaattatgttccaagttatcgttatgcacaaattaaatacgaagacgatgatatggcaatcgtaatgaaacctaaaggtgttaagactcaccctaatgatttaaaagaaagcaatactttaatgaatcatgtgatttacactattgatagtgactatgtcgaaccaattcatcgactggaccaggaaacagtaggattattaattgttgctaaaaatcctttaatgaaaaaaattcttgatcgcatgttagaagacaatgatattacgcggatatacaaagcaaatgttaaggcacttttacctttaaaaccacaaacgattgatatgccaattggtaaagataaattccattcgaataaacgacgtgtgtctcctactggacagcgtgcaattacacacattttaacttcaaaaatgataaaagaagctgtgtgccaacttgaaatcaagttggatactggacgtactcatcaaattcgtgtgcatttagctgaaattggtcaccctgttattggtgatcctttatatggtgattcaacgttaagacaattagaacttgaaagttacaaaatagagtttgtgcatcccttgactaaggaagtcatttccgtttctttggatgactaatttgattagttttgcatgatatttaaacatgcaataccgcattgtaactaaatcaagtatcaacttaaatcggatagatggaaaattattaattttttcagatgttcggtttttttgttttttacgatgcttaggattttatattttgatattttagcaattattcattttataacatccttggataatgacttgtagtctttttcaactgcgttacgtgtatctatggacaatacatgacatcataagatttttatcacaggttgtttggccaatacatgtacaacaattcatcatataaaaaataggttctataataaaacggactccatgaaaagtttttccttttcatggctctatatcaaatcggacttataagttcaatttgacatagacaaaaaataaagcttgaacactataatgcccaaactttattttatattaatatttaattaatgaggatctaccatatcttctggtttaatccatgcttcaaattgttcttctgtaacatatccagtttgaattgcagattcttttaaagttaaaccttctttatgggctttcttagcaatttgagctgctttttcataaccaatatgtggatttaatgcagtaactaacattaatgattgatttaaataattatcaatattctcttcgattggctcaatgcccactgcacaattgttattaaatgtttccataccatcagctaaaaggtaaattgattgtagtgtattatgcataataactggtttataaacattcaattcaaagttaccttgtgaacttgcgaagccaacaactgtatcattacccattacttggactgcaaccattgttaacatttcacattgtgtaggattaactttaccaggcataattgatgaacctggttcattttcagggatggaaatttctgccaaaccagctcgtggacctgaagccaaccatctcacatcattagcaattttcattaaatctccagctaatgccttcaatgttccgtgcaattgaacaacttcatcatgcgctgtaagtgcgtggaatttattttcagaagatacaaatggataacccgtattttctgaaatataatgtgccaccttatcaccaaattcaggatgcgcattaataccagtaccaacagccgtaccaccgatggcaagatttaaaatgtgcttcttagattcagataacattatttcgcaacggtcaagcatataacgccagccactaatctcttgtcctagtttgatcggcgttgcatcttgtaaatgtgtacgaccaattttaataattgattcaaatttgtcttctttttctttcaaagtatttcttaaaagttttaatgcaggttctaattttgtttcaacctcttgatataatgcaacgtgcatagcagttgggaatgtatcattcgaactttgtgattcatttacatcatcatttgggtggatactttcatcaatttgatgatcttttaaatacatattagcaacataacttactacttcgttcacattcatattactttgtgtaccgcttcctgtttgccatacaactagtgggaagtgttcatctaattcacctgataaaatttgatcacatgcgtatacaatggcatctttctttgcctcgcttaattttcctaaatcaaaattagctaatgctgctgcacgctttagttgtgcaaaaccataaactacttcgattggcatacgctctttaccaactgggaaattgcgtttacttctttctgtttgagcaccccaatatttatctgcaggtacttctatttctccaaaagtatcatgttcaattcttactgacattcaatttctccccttatcactgtttatttaactgtagtatatcattaaataatttaattgagcaatttatgattaaaacgttttcataatttgaaataaaaatacactaatcgcacgtactcaccctttattacagtgatacggtcatacgattagtgtgttatctatcattatttagttattgttgaactaagtttaattacgatactttgttttagtagcttcaaccgtagcaatagctgtaagtatatataatacagcactaacaattgtcgtatatggatttagagcaacaagcgtacctaaaactcctgttaaactcgcataaaacccatcaagtgtataatacaatattcctgttattaataaacaacaaattacacttattacaatacctgattgattacttttaatgaatgtttgcgcattaacatcatcgattaatccttttgataaattgagttgtaattttattactttgaaaataacaggtaaatataatgccccaattgccaatggaaaagctttaattgatattaaacttataataactgttgctatcaataattgaatccagtattttcctaacataaatatataaatctcctctaatttcattcttcaatagcatatcataatcttggcatattaagaaacgcggtttaatgatttcattaaaaatattactgatagatgacttctttcaattatgtctggagtaattaattatcaattccgtttaaatggtgttttaatatttaaaattgaacttttgatatattactatgtctggtacacaaatcaatgttttatgctttacaaagttatattggcagtagttaactgcagtccacaaacatagaagctggtggaaagtcagcttactatttcatgcaagttggcgaggccccaacatagtgaaatcggatttctaatttctacaaacagtgcaagttggggaaacgggccacaaactcagaagctggcagaaagtcagcttctatgaatataataaaaaagctaggtaacaaaatgctacctaacttcatattcaagataatcaatcctatttgatatatgttctatactatacattatttacatgataaataactgaatattacacaattataatactttactgactgtcttcttcagaatttttttcttgatcattttgatcagagatttgttccatttctttacctaattcttttaaatcttcaaaatccgttaccatactgttttcttcttcatgataatttaattttggatctttgtctttagacataatcaatacctcacagatttttaattaagcaaagcgtgacgtaaagtaagctttaacatcttcaggtaaacctgcagccgcttctttatcaagaataacatttaccattctatgtgcttttaaatcggctggttcgaagcttgttttaccattttcttgatataatttttcaactacatctcgtttattagcacctgtcactactaagaaaatttctcttgcttccattagtccttgacgaatactaacatttaacttaccttgctcatcgatagaaacaacttgtaatgttaatttccctttattttctttagttttaatcttatcagcgattaattcgattgcatctttttcataagcaattggataaacttgacctgctggtacacctaacgcttcgaaatatgattttttatcgtcataatctaaaatatttatttggctaaaatcaacagcatgtttttcaacatttttctttaattcatctagaactggcgcttgatctgtatctaaatgaaaacctgcaattgtagtaggattattgttaaattgctttctaataatatcagcagcatattctgctacaagttgactattgtcaaagactttaaagttcattgccatgatttctacactcctcttagtttgcattttacataaaaacggcgatattaataattattataccctaactttcaatatatcaaaccatttaactttaacatggttatactctaaatatagcacttaagtatcatttttataatgaaaatagacgaattttaattcaatcctggaaaatcttgttgacgtaacgcttcataaattaacaacgcagcagtatttgataaatttaatgaacgaatatgttcactcataggaattcttaacgctgtgtcttgatatttctctttcacccagtctggtaatcctgtcgtctcttttccaaaaatgaagtaaaaatctttgtcatgatttgaaaaatcaaaatcactataagtctttttaccaaattttgttaataagtaatactcgccatttgtggcttcaaaaaatgcttcaatactatcatgatacgtaatattcacaaattcccaataatctaaaccggctctttttaacattttatcatcagttctaaatccaagaggtttaattaaatgtaaatgtgtgtttgtacctgcacacgtacgtgcaatgttaccagtattagctgggatttctggttgatataaaacgatatgatttgtcatattactattctctccttgtgtctaatccttttatcatttcattctgaacttctgcatcctcttgatcataattagcattgataaaatctcttgcttcttccccaagaatttgaccaatggcccaataagcagttgctcgaatcatcggtctttcatctgttgttgcaacttttttcaattctggaattgcatccacttcattaaaatgcgctaatgctaaaatagcatttcgttgtatcggctttttaccacgccaagcacctgcaaggtgaccatatgtttgtttgaattctttattagacatacgtagtaaaggtactaatcttggctttaaaatttctggttccaaaatgatgtcatcttgttcggtattaatacctctatttttcggacaaacttgttgacacgtatcgcaaccatataatctattcccaattttataacgatattggtcaggcatatagccttttgtttgcgttaaaaaactaatgcatttctgactatttaattggccatttccaactaatgcacttgttggacaacgatcaacacaaattgtacaatcaccacagctatctaataatggatcatcaggttcaaaaggtatactgactaacatttcaccgaggtatgtccatgttcctagtttaggattgatgacaaagccattacgaccaacaaatcctaaacctgcacgttctgctactgccctatctgataatacacccgtatctaccatagatttgatttcaacatctggaactttagattcaataaatgcagctaacatgtctaatcgtttacgcataattgtatgataatcttgaccccacgatgctctagcaaataagcctctgcgatcacctctaacactcttaggtgcacctttcagtttgttaggataaccaactgcaattgctatgattgaccttgctgttggtaaggataatttaggctccgttcgtaaagcaatatcagattcttcaaatcctgaggcataaccatttgcatgatatgcttctagcttttgcttcaattcatcaaagggatcggcagttgtaaatccaatactgtcgataccaattgtatatgcatagtcaatgatatcttgctttaactgctttgtatccaatcgtatgccccccataaaataatactatgttattttaacacaaccattattcatattgaggtttcatttcacataattttaataataaaaagcttgaatatatgatataactttgtggtgcgcatcatatattcaagcttcgttaggttgttataatactcttgctaagaaattttgtgttctttcatgttgcggttgttcaaatatttcgactggtgtgcctgactctacgacaacgccatctgccataaatatgactttgtcacttacatctttggcaaatcccatttcatgtgtcacaaccaccatggtcataccttctttggctaggtctttcattacttttaatacatcaccaactacctcaggatctaatgctgaagttggttcatcgaataaaataacatctggatgcattgctaaagctcttgcaattgcaaccctttgcttttgaccacctgataattgattcggatatacatctgctttttcttttaatcccactttatctaataacgacaatgcttccttatgtaattcatcgttattatctttctttaataatttaggagctaaaataatattatcgacaacttttttatgtggaaataggttgaagttttgaaataccatacccattttttgacgtagtttatctacttgtgtccctttttccgttaagtcattgccttcaaaaatcacttgacctttagtgggtacttctaataaattcatacatcttaacaatgtacttttaccactaccagatggacctattattgctactacttccccttgattgatttcaagattgatatcttttaaaacttcattatctccaaaaactttattaagattgtttattttaatcactggcattcaatctcccttcaatcatgttcataatgcgtgtaagtacaaatgttaagacaaagtataatgctgctgccactagtaatggtgtgaatgggtcaaatgaaataccttgaaccacttgtgcattaaacataatttcgccaactccaattgttgacacaatagatgattctttaattaaagtgacaaattcattacctaaagctggtaaaatatttttaattgcttgtggcataattacacttttcatcgtttgtctataattcaaacctagactacgtgcggcttccatttgtcctttatcaacagcatttatacctgcacgaataatttcagcaatgtaagctgaggaattaataactaatgcaattgttccacaaacaagagctgaaatgtctagtcctaatgcagcagttataccaaagaatacgataaatacttgaactaacattggtgttcctcttaatatttcgatatagatagaagcaatccatgaaataatttttattttacttaatttcattaacgcaacgaatgcacctaaaatagaacctaatgcaacaccgataagtgaaattaatattgtaatcttaattcctttcaagaaaaaactaccatacttagaaataaaaccactgtcatcattcatcgcatttgcagcattagtcatatatttatcgattaatcctttatctttaacctctttaatcgttttattaatttgtgacaataattttggtgaatcttttggcacagctatcactgtatctttttcttcttcattaaatttcacattggaaattcctaatttaggattttgttttaaatatgcttctgctacaggtttttcaactacagcaccttcaacctttccacttttcaatgctaatataacgtctggtaaacggcttaatgaagtaatagatgcattttcaatttcggtttgagcgattttttcttgttcagttcccttttgtgcccctacttttttattattaaagtctttgatatctttatattcattaactttatctttctttacaagcatgatatttttagtcatcatatatgaatctgaaaaatcaacttgcttcttacgttcaggcgttgaagtcattccggaaataataatatcaatttttccagttttaagagctcctaacaaactatcaaatgacatattgacgatttttaattttaaattattatctttcgcaatttttttagctaaatcaatatctacacctgcatactcagtcttaccattaactgtatgctcaaattccattggtgcataatctgcagaaagacccactctaagttcaccgcgttctttaatcttctcccatgtttgatcttgttcagcatgtgctgtgggattgatatacaccatagcactgctaattaacaaccctaatactaatataaacctaattaaacacttcatttatacagccctccctaattaatattcataattatacatattaatacattttgatgcaatagtgttttataaatgtatttttatcaatataaagaaaagcttctttttaaaagactgtacataaaaaatccgctattatacgtgaacaaatctcacattttaaaatcaatcaaaaaagcgctactatcaatatcttattgacagtaacgcctatatttatcatatattaaaacttattcttgtcatcaagctatcaattattgttttggaacttcaaatttataaatatcattagaatatataggaatgaattttttacacaattcatgaacaataaatgccgatacaaatggtatgacaaaataaccaagtgctaataaaataatattcattgttggatcacctgacattcggttaaatgcatttattgggccaactaatcctgtatatccaaatccagcagacaatggtgttcctttaacctgaagaacgtaagcaatgattccagtaattattccatttatagtcaatggtatcgaaataattaaatttttcaagtaaactgggatcatcatttttgcagctcctatgagtaaaactgcatttacaccaatagaattgacacgcaatgagccaaataagaaagtaacacaggcagccactatacctaggtttgctgctccacttcctagtccgtttaaactaatcgcagttgcaatcgctactaacgatattggtgttaccattaataatgaaaatgccacactaataagtatagacattaacaacggatttaagtctgtaaaagaatgaattacatttccaattgcttgagtaatttttcgaatgtaaggtaatgtgattagaccgatacccccactaacgataggtactaaaactggtaatataattaattcaaaagatccaagtttgttttgtaataccatatatataagacatgcaataataacaaccaaactcgtatttataatgtcacctataccttttaacataaaactattattgctatatacaacagcacctgaaccaatcatagctgatgtacctactatagcagcacctgcgccattaaatttaaattgatgagcagctaaaaccccaataataaatgccataaatgattgaattagtatcactaactgatacgttaattctaaaatttcattaccacttttaaatatttttaatacttcacctaataaagcattcggaacaagtgcaataacaacaccagcaccaatagaatttaaaatcttactgaaaaactgtttattatcagcattatttgcgttactcataaacgacctccaatttgaacattaaactcatcatattatagaaaattaactttaacaatgattagttggctaatttaatctaaatataacaatccacaaaatgaataaagtaaatttaaacaatctactcactaatcaatgtcatgctaatcttaaaatactactaattacatcctgtgactaataatgtaataaattgtaaatattaaaatagccatattactattaagatagataaattgaatcgacttggtataaagcacaataaaatagcacttttacaaatatattattagaaaagttgaaacaaatatataaccccagataatataatcattatcattaatgtaataccaaaaaaagaagttaaacaatgcatagttgcttaacttccaatattgaactcatcattacaatttgacatagagtctattaaagcgtgtgccatttgagtccacttttatggttcttcatcttttatggtgggaaggtaaaacttcctgctttttttaatacacaaaaagcgcaattgcctctataatttaaagtgaccaaacccaaactaaaggagacaagtgcgcctatgtgtaatgataccttagaattactaagaataaaagatgaaaatataaaatatataaaccaagaaattgacgtcattatcaaaggaaaaaaagcaacagtggttaatgctgtactaacgtataagccttcggcctgttattgttgtggagttaaaaatgaaggacaaattcataaacatggtaagcgtgtttctcgtattactttacttaaaactcaagggtataacacatacctcaacttagctaaacaacgttttaaatgcttagaatgcaatggcacttttactgctaaaacgtcaattgttgatgagtcgtgttttatctcaagatgtgttactcaaaaagttatagaagaagctactaaagttaaaacagagattgatactgcagaagataactgtatctctccatctactgtaagtcgtattagaactaaagcggctaattcattacgaattaaaccgtttaattgtttgccagaacacatcgctatggatgaatttaaaagcgttaaaaatgtaactggatcaatgagtttcatttttatagataatgatactcatgatgttatagatattttagaaaatagaactacaagattcttgcgtgcctatttcgagcgattcgatttaaaaaatcgacaacaagttaagacggttactattgacatgtatgaaccctatgtccgattatttcgcgacctatttcctaatgcagctattatttttgacagattccatatcgttcaacatttaaatagggaacttaataagtatcgtgtacaagttatgaatgaataccgtaataaaaaaggacctaattatacaatttttaagaataactggaaagttctattgatggatactagtaaaaccatatttagtaaatacagatggaataaatcttttaaggcttataaacgctcatctgacattgtagaattcatgctttcaaaagacgatatactacgacgctcctacgaacttgtccaaggattaagaaaagatctaaggttatgtaattggcctaaatttattaatcgtttaaattcagttagtaaaaagtctgtgagtaaaggtgtatggaaagtggttaaatattatagaaaacatcaaaggatgttaagaaatacaatttattacccagcatttaataatggtgctatagaaggaattaataataagataaaattaatcaagcgaatttcttttggttacagaaatttcaacaactttaaagcacgtataatgatgattttcagcttatacaaaggagaaaaaaagaagacaaccaagcccaataatggactggccgcctaataataaaaactctaaaagttgtaatttaaaatagttctttaaattatatacccaccacatttggtggagaaccacttttatttgtattgtatagagagaaataaaaagaaaccttgttttacaaggtttctaataggttatgttatgtaaataacagttaattataccggtggtcggggtcgaaccgacactccacaagtggaacgggattttgagtcccgcgcgtctgccaattccgccacaccggcttaatggtaaacaaaaaacttccctttggaagcaattatggagcggaagataggatttacacctatacctcgttccgggaaggaacgtgttctaaaagttgaactactcccgcaaatattaaattatggagcggaagataggatttacacctatacctcattccaggaaggaatgtattctaagagttgaaatactcccgcattattattaaattatggagcggaagataggatttgcacctatacctcgttccgggaaggaacgtgttctaaaagttgaactactcccgcataaacctggaggcggcaaccggatttgaaccggtgataaaggttttgcagacctctgccttaccacttggctatgccgccaataactgggctagctggattcgaaccaacgagtgacggagtcaaagtccgttgccttaccgcttggctatagcccattaataataagggcggctgaaggggatcgaaccctcgaatgtcggaaccacaatccgatgtgttaaccacttcaccacagccgccatggcaggggcagtaggaatcgaacccacaccaaaggttttggagacctctattctaccgttgaactatgcccctattaaaaataataaatggaggggggcagattcgaactgccgaacccgaaggagcggatttacagtccgccgcgtttagccacttcgctacccctccataaatggtgccggccagaggacttgaacccccaacctactgattacaagtcagttgctctaccaattgagctaggccggctaagaaatggttcaggacagagtcgaactgccgacacatggagcttcaatccattgctctaccaactgagctactgaaccataataaaaatgtaatgatggcggtctcgacgggaatcgaacccgcgatctcctgcgtgacaggcaggcgtgttaaccgctacactacgagacctattaaattaaaaactatgtattgcgggaggcggatttgaaccaccgaccttcgggttatgagcccgacgagctaccgaactgctccatcccgcgataataaaaaataatggcggaggaagagggattcgaacccccgcggcccgttaaggccctgtcggttttcaagaccgatcccttcagccggacttgggtattcctccattattataggtaaatcgctattaattataaaattaaatggcggtctcgacgggaatcgaacccgcgatctcctgcgtgacaggcaggcgtgttaaccgctacactacgagaccattagtaaaacggaggaagagggattcgaacccccgcgagccgttaagcccctgtcggttttcaagaccgatcccttcagccggacttgggtattcctccaaaattatatggaccttgcaggactcgaacctgcgaccgaacggttatgagccgttagctctaaccaactgagctaaaggtcctaaatataattttacaactaataaatagtggcggtggaggggatcgaacccccgacctcacgggtatgaaccgtacgctctagccagctgagctacaccgccttatatagtttgtaaataatatggtggagactagcgggatcgaaccgctgacctcctgcgtgcaaagcaggcgctctcccagctgagctaagcccccataataattacagtatatcgggaagacaggattcgaacctgcgaccccttggtcccaaaccaagtgctctaccaagctgagctacttcccgtataattaacgcgcccgataggagtcgaacccataacctcttgatccgtagtcaaacgctctatccaattgagctacgggcgcatatgtttttattgaaaatggtgccgaggaccggaatcgaaccggtacggtgatcactcaccgcaggattttaagtcctgtgcgtctgccagttccgccaccccggcactataaaaatggagcagaagacgggattcgaacccgcgaccccaaccttggcaaggttgtattctaccgctgaactacttctgcatatgcgggtgaagggagtcgaacccccacgccgtaaggcgctagatcctaagtctagtgcgtctgccaattccgccacacccgcaaatggtgagccatagaggattcgaacctctgaccctctgattaaaagtcagatgctctaccaactgagctaatggctcttccatggtgccggccagaggacttgaacccccaacctactgattacaagtcagttgctctaccaattgagctaggccggcaatatgtaagaataaatggtggagaatgacgggttcgaaccgccgaccctctgcttgtaaggcagatgctctcccagctgagctaattctccgatttaaaactgcctggcaacgttctactctagcggaacgtaagttcgactaccatcgacgctaaggagcttaacttctgtgttcggcatgggaacaggtgtgacctccttgctatagtcaccagacatatgaatgtaaattatacattcaaaactagatagtaagtaaaagtgattttgcttcgcaaaacatttattttgattaagtcttcgatcgattagtattcgtcagctccacatgtcaccatgcttccacctcgaacctattaacctcatcatctttgagggatcttataaccgaagttgggaaatctcatcttgaggggggcttcatgcttagatgctttcagcacttatcccgtccacacatagctacccagctatgccgttggcacgacaactggtacaccagaggtatgtccatcccggtcctctcgtactaaggacagctcctctcaaatttcctacgcccacgacggatagggaccgaactgtctcacgacgttctgaacccagctcgcgtaccgctttaatgggcgaacagcccaacccttgggaccgactacagccccaggatgcgatgagccgacatcgaggtgccaaacctccccgtcgatgtgaactcttgggggagataagcctgttatccccggggtagcttttatccgttgagcgatggcccttccatgcggaaccaccggatcactaagtccgtctttcgaccctgctcgacttgtaggtctcgcagtcaagctcccttatgcctttacactctatgaatgatttccaaccattctgagggaacctttgagcgcctccgttaccttttaggaggcgaccgccccagtcaaactgcccgcctgacactgtctcccaccacgataagtggtgcgggttagaaagccaacacagctagggtagtatcccaccagcgcctccacgtaagctagcgctcacgtttcaaaggctcctacctatcctgtacaagctgtgccgaatttcaatatcaggctacagtaaagctccacggggtctttccgtcctgtcgcgggtaacctgcatcttcacaggtactatgatttcaccgagtctctcgttgagacagtgcccaaatcgttacgcctttcgtgcgggtcggaacttacccgacaaggaatttcgctaccttaggaccgttatagttacggccgccgtttactggggcttcgattcgtagcttcgcagaagctaaccactcctcttaaccttccagcaccgggcaggcgtcagcccctatacatcaccttacggtttagcagagacctgtgtttttgataaacagtcgcttgggcctattcactgcggctcttctgggcgttaaccctaaagagcaccccttctcccgaagttacggggtcattttgccgagttccttaacgagagttcgctcgctcaccttagaattctcatcttgactacctgtgtcggtttgcggtacgggcacctattttctatctagaggcttttctcggcagtgtgaaatcaacgactcgaagacacaatgtcttctccccatcacagctcagccttaacgagtaccggatttgcctaatactcagccttactgcttagacgtgcaatccaatcgcacgcttcgcctatcctactgcgtccccccatcgattaaaacgattataggtggtacaggaatatcaacctgttatccatcgcctacgcctgtcggcctcagcttaggacccgactaacccagagcggacgagccttcctctggaaaccttagtcaatcggtggacgggattctcacccgtctttcgctactcacaccggcattctcacttctaagcgctccacatgtccttacgatcatgcttcaacgcccttagaacgctctcctaccattgtccaaaggacaatccacagcttcggtaatatgtttagccccggtacattttcggcgcagtgtcactcgactagtgagctattacgcactctttaaatgatggctgcttctaagccaacatcctagttgtctgggcaacgccacatccttttccacttaacatatattttgggaccttagctggtggtctgggctgtttccctttcgaacacggaccttatcacccatgttctgactcccaagttaaattaattggcattcggagtttgtctgaattcggtaacccgagaggggcccctcgtccaaacagtgctctacctccaataatcatcacttgaggctagccctaaagctatttcggagagaaccagctatctccaggttcgattggaatttctccgctaccctcagttcatccgctcacttttcaacgtaagtcggttcggtcctccattcagtgttacctgaacttcaacctgaccaagggtagatcacctggtttcgggtctacgaccaaatactaaacgccctattcagactcgctttcgctacggctccacatttactgcttaaccttgcatcaaatcgtaactcgccggttcattctacaaaaggcacgccatcacccattaacgggctctgactacttgtaagcacacggtttcaggttctatttcactccccttccggggtgcttttcacctttccctcacggtactggttcactatcggtcactagagagtatttagccttaggagatggtcctcccagattccgacggaatttcacgtgctccgtcgtactcaggatccactcaagagagacaacattttcgactacaggattattaccttctttgattcatctttccagatgattcgtctaatgtcgtcctttgtaactccgtatagagtgtcctacaaccccaacaagcaagcttgttggtttgggctcttcccgtttcgctcgccgctactaagggaatcgaattttctttctcttcctccgggtactaagatgtttcagttctccgggtgtgccttctgatatgctatgtattcacatatcgataacatgacataactcatgctgggtttccccattcggaaatctctggatcaaagcttacttacagctccccaaagcatatcgtcgttagtaacgtccttcatcggcttctagtgccaaggcatccaccgtgcgcccttaataacttaatctatgtttccaccatttttataagtcaaacgttaacatgaagttacgttcttttataaaaagatttaaacgcgttattaatcttgtgagtgttctttcgaacactagcgattatttcttatgaattcaagcttatttaaaactctttattcactcggttttgcttggtaaaatctatattttacttacttatctagttttcaatgtacaaataatggtggagactagcgggatcgaaccgctgacctcctgcgtgcaaagcaggcgctctcccagctgagctaagcccccaaataggtattaaattaatggtgggcctaagtggactcgaaccaccgacctcacgcttatcaggcgtgcgctctaaccagctgagctataggcccattaatttgaatgaacaaacattcaaaactgaatacaatatgtcacgttattccgcatcttcttcagaagatgttccgaatatatccttagaaaggaggtgatccagccgcaccttccgatacggctaccttgttacgacttcaccccaatcatttgtcccaccttcgacggctagctcctaaaaggttactccaccggcttcgggtgttacaaactctcgtggtgtgacgggcggtgtgtacaagacccgggaacgtattcaccgtagcatgctgatctacgattactagcgattccagcttcatgtagtcgagttgcagactacaatccgaactgagaacaactttatgggatttgcttgacctcgcggtttcgctgccctttgtattgtccattgtagcacgtgtgtagcccaaatcataaggggcatgatgatttgacgtcatccccaccttcctccggtttgtcaccggcagtcaacttagagtgcccaacttaatgatggcaactaagcttaagggttgcgctcgttgcgggacttaacccaacatctcacgacacgagctgacgacaaccatgcaccacctgtcactttgtcccccgaaggggaaggctctatctctagagttgtcaaaggatgtcaagatttggtaaggttcttcgcgttgcttcgaattaaaccacatgctccaccgcttgtgcgggtccccgtcaattcctttgagtttcaaccttgcggtcgtactccccaggcggagtgcttaatgcgttagctgcagcactaaggggcggaaaccccctaacacttagcactcatcgtttacggcgtggactaccagggtatctaatcctgtttgatccccacgctttcgcacatcagcgtcagttacagaccagaaagtcgccttcgccactggtgttcctccatatctctgcgcatttcaccgctacacatggaattccactttcctcttctgcactcaagttttccagtttccaatgaccctccacggttgagccgtgggctttcacatcagacttaaaaaaccgcctacgcgcgctttacgcccaataattccggataacgcttgccacctacgtattaccgcggctgctggcacgtagttagccgtggctttctgattaggtaccgtcaagatgtgcacagttacttacacatatgttcttccctaataacagagttttacgatccgaagaccttcatcactcacgcggcgttgctccgtcaggctttcgcccattgcggaagattccctactgctgcctcccgtaggagtctggaccgtgtctcagttccagtgtggccgatcaccctctcaggtcggctatgcatcgttgccttggtaagccgttaccttaccaactagctaatgcagcgcggatccatctataagtgacagcaagaccgtctttcacttttgaaccatgcggttcaaaatattatccggtattagctccggtttcccgaagttatcccagtcttataggtaggttatccacgtgttactcacccgtccgccgctaacatcagagaagcaagcttctcgtccgttcgctcgacttgcatgtattaggcacgccgccagcgttcatcctgagccaggatcaaactctccataaaaattatgatgtttgattagctcataaatactaaataatgtttgtaacttatagttacgtttttggaattaacgttgacatattgtcattcagttttcaatgttcgtttgtcacttacaacatttaattataactcgtaagtttttgtaagtcaagaattatttttaattattttatttctaaaaaataaatttcctaactcaattaattcaacaaatattattttattatgtatttgttcgaatttcaatagtcaaatttacactttattaatattttaaatcaacaacttaaaacatttgttttttaaatattagtgccgtttgacgacttttatataatatcaagttattctagtagagtcaacataaaacaacacttatttttgtttaaaaattactgttgaagggattattttctattcgtaagtactatatgtatttaaagtgtaattccttacgctttttacttcagttttacaaacaaacttatactcactttatggatagttatttagtagaccttcgtttgaatatttttatgtttatttataaagggtactagttattagttaataccacttccgtagttagaatattcttttcttcaatttaaatatttttcagaataagcataaaaaagaagttaaacaactttcatgtcgtttaacttcttaaatattacacttacttatatgaagtaagctaacgcttttttaatttgtcatactaccaaagttaaattatttatcttggcattctttacaaactccataaatttccattcgatgatgtgttacgtcaaagtcagtcatatgctgagctaatctttcaatttcatttaactgtggatattgaaaatcaacaatcttaccacattgttcacatataatatgataatgattatgtgtattaaagtcgaatcgacttgatgagtctccatatgttaattcttttacaattccaatatctttaaacactcttaagttattatatattgtcgcaacacttatatttggaaaatcaggtgaaagtgcttgataaatttcatcagctgttggatgagtatgtgaagaaattaaataacgtaatattgcttgtctttgaggtgtaattcttatgcctgcttgtcgcaatgatgcaattgattcttctagttcatgttcaattgattctatttcaacactcatctatatcaccatctttcttatataataattattattacttactataaatataactgtagtattgcgcgcgtgtcaatatttacatgatgatttcatttaatagccttttttagcatcaacttcattctcaattagaccattcttattgagaaaattaactagattgtttttaaaaatatctaataagtcatactttgcctcataatcattaccagttatatgcgctgttatagttacattttccaattcatataattcatgattaggtttcaaaggttcattttcaaacacatctaaatatgtatgtcgaataactttactttttaatacttctattaagagcgcttctttaactatgctacctcgtcctatatttataaaaagtgcttcatctttcattaattcaaaatgttttttctttagtaaatgaatcgtttcttgcgtttctggtaaagcatttataataatgtcagcatttggtaatgtgctttcaagtgattcgatagtatatatctcgtcaaactcatctttgttctgacctgacttgctcagaccaattaaattcatattaaaagcctttgctaacttcgcagttctagtagcaattgcacctgtacctaaaaataaaactgtttgtcctgataggcgtttaccagttattttcgaatcatatatatgttgtctttggttatcatatgatagtttcatctttttataatcatctaaaatgaaagctaaaatgtattcagataattgtttagcttgaacaccttttccattagttaaaagtatgccgtgatctgcaatataatctaacggtaatgtatttacacccgttgcaaaccatgcaatccattttaaattcgggcaacgttgtaaaaatgcctcattgataccgccatcataaccaactaatatatctaaatcagccaagtcactctcaggtatttctgatgcttttttataaaatttaaaatctaaatctgaaaagcgttgttgtaattcagtttcaacttcacgcatacgatttaacccaacaactttcatatatgtcaccccaaaatgtttttaagttcttctatttgtgttttaaccttaaccttctcgataacatctaatactttaccttgttcatctattataaaagttgttcttacaatacccatactttctttgccaaatgatttttttaactgatatacgcctgtttctttagctaatttaaaatcttcatctactaataaatcgaaattcaatccgtgtttctcaataaaattttggtgttttttctttgaatcaccgcttataccatatactgcaacatctaaatcattgaacatttctaaattgtctctaaagtcacaagcttctgtggtacaagtaggtgtattatatctaggataaaaatatataatcgcctttttaccttttaatgtatcatttgtaatgacagttccgtcttgattttctaatttaaatattggaaattgttctcctttttgcaacatataatcacctttttcttcattataataattttatgatacgatattagatgaaaatattaaattaaaagaggttgatataaatgaattttagtgaaagtgaacgtttacaacaactttcaaacgaatatattctaggcggtgtcaattccccttctcgttcttataaagctgtaggaggcggtgcacctgttgttatgaaagaaggacacggtgcatatttatatgatgtcgatggcaataaatttattgattaccttcaagcatacggtccaattattgcggggcatgcacatcctcatattactaaagcaattcaagaacaagcagccaaaggtgttttatttggtacaccgactgaactagaaattgaattcagcaaaaaattacgtgatgcaattccatctcttgagaaaattcgctttgtaaattctggaacagaagcagtcatgacaacaattcgtgttgcacgtgcatatactaaaagaaataaaattataaaatttgctggatcttatcatggccattctgatttagtattggttgcagcaggtagtggcccatctcagctcggttctccagactcagctggtgttccagaaagcgtcgcacgtgaagtcattactgtacctttcaatgatattaacgcatataaagaagcaattgaattttggggtgatgaaattgccgcagtattagtagaaccaattgttggtaactttggaatggtaatgcctcaacctggatttttagaagaggttaatgaaatttcgcataacaatgggacactagtgatttatgatgaagtaattactgcattccgtttccattacggtgccgctcaagatttattaggtgttatccctgatttaactgcatttggtaaaattgttggcggtggtttaccaattggaggctatggtggacgtcaagatattatggaacaagtagcacctctaggacctgcatatcaagctggtacaatggctggtaacccgttatctatgaaagcaggtattgcattactcgaagtactagaacaagacggtgtttatgaaaaattagacagcttaggccaacaactagaagaaggtttacttaaattaatcgaaaaacataatatcacagctacaattaatcgtatttatggatctttaacattgtactttacagatgaaaaagtcacacattatgatcaagttgaacattctgacggcgaagcgttcggtaaatttttcaaattaatgttaaatcaaggtatcaatttagcaccttctaagtttgaagcttggttcttaacaactgaacatacagaagaagatattcaacaaactttaaaagctgcagactatgcttttagtcaaatgaaataacttttaaggaagtatatttttaattgaattaaaataaaacaaatgctcacatagtagattcattttatatcgttaactattaacgtttaacttgatatgtcactatgtgagtttttattttacaaatttatactcttttaatctctgactaaagttttacatcgctatcagtattatgtatgatttattttaacaactataaataagcttgaattttataactagtaagtgtataacagtaatgaatacgaatattagatattcaataaacttaaaaggggcgtcattatttttgagactaggagctcggatttttaaaactggtatagccattattttagctatgtctatcgcttctttactaccggatgatgttggtctgaaagccttagctggtgtcagtgctgttgttgcaatgcaacctagtatttatcgttcatttaaaacagtttctgatcaagcattgggtaacattataggtgccatattatctgttacaatggtaacaatttttagtgataattttatcattatgggtgttaccgtcatagtacttattgctattttatttaaatttaatttagcacatgttgctactttggcgagtgtaacagcattaatcattatgggacaacataccggttctttctatattaccgccttttacaggtttgtacttgtaatgattggtgtcataagttcatctctagttaactttgtgtttctaccacctaaatttgaaacaaaaatttactataattcattaaatatatcctcagatatttttatgtggtttaaattagtattaaatgatacgacggagtttaataatattaaacaagatagtcataatttaaaacaacgtgtcgaaaagttagagaaaatttatgattactatagcgaagaacgtcctattacaaaaaaacatattcaccaacagaatagaaagaaaatacttttcagagaagtagttcagacgactagacaagcttatgaagtattaaacaaattgtcgcgttatcaaaacgacttatatttacttaataacaatttcctattacaaatcaaattagatttagattcattaactgcttttcacgagcaaattttagctagcctttctaaaaaagcacgttataatgtgacacatgttgattatgagttagataatccgcagaaaaaagatttattgtctacatttcagcatgagttaataaatcatccttatcaaacggaatattcgtttgccaatgttatgcaaattgttgcagccatcgaagagtatcgacaccatttagagcatttagaccgcataagaattagctttttcacatatcataggtctgatgcagacattgaaattgttgaagaagactttgatttataagtttaaagcaattcctgtaattaataccacaatgagataaagtaatattgaatctcgaaattaaatttaaaaaagcagtaagattattttcaatgaagaaaatctcttactgcttttctatgttatgaccccaccatcctgttacaaatcttccctacaagattgtactgaagtcaaacaactaatactttataagttttgaatgctatataaatgctcgtaagcaccttgttttgcaatcaattcacgatgcgtacctgtttcaacaatatgtccattttcaattacgacaattttgtcagcatgtgtaatagtggacaagcgatgcgctacgataagtgtcgttcgatctttactcaacacatctaatgcttcttgaataatggattcactttctaaatcaagtgcacttgttgcttcatccaagataagaattggcggattatttaaaaatattctagcaatcgataatctttgtttttgaccacctgataatttaacacctcgttcacctacttcagtgtcatatccctgtggcaagttcataataaagtcatgtgcattagccattttcgccgcttcaactacttcttcatctgttgctgttggacgaccaagtaaaatattttccttaactgtatcagagaataaaatattatcctgttgcaccaatcctatttgatttcttaaacttcccgttaaaaaatctttaatattgtgaccatctattaaaatttgcccagaagttacatcgtaaaatctcggtattaagttaattaatgttgatttaccaccaccactcatacctacgaaagcaactgtttctcctttttcaatactcaaattaatatcttttaaaattggagcttcgttatcgttatattgaaaactaacatgatcaatatcaatacgaccttgtttaatttcaataggttgagcaccaacaccatttttaatgtcataatcttcgtcaattaattggaatacacggtccattgaagcaaaactttgcgttaaagttgtaaatgatgcgactaaacgacgtaaaggcccgaacaataactctaagtatccaacaaatgctgcaagtgtacctactgtgattgatccagaaatagcaagatatgcaccaacaccgatgacaataattggtccaatatctgtaactgtattaattgcggcaaaggaataggcattccatcttgtatgtttcaacgcacgtgttaagaaattagtattctttttatcaaagtttttcgcttcattgtcttcaatcgcaaaacttttaacgactgaaataccttgaacacgttcatgcaagaatccttgaacctcagctaatgcttgcgatctctcacgcgtcaattttcttaatcttccaaagaaaacgtacaccgttaaaatgtaaaatgggaagataaacagtgctgctaaagtcaatttcacatctaaaaagaacattatggatagtgcaataataattgttatacaatctaaccaaatattcattaacccggttaaaatgaaatcttttgtttgttcaacatcattaatcactctagatattacttgacctacttgattattagcataaaatctcgcacttaaagcttgtaaatggttatataactttttacgtatatcatacaatattttattacttgtccattgcgccaaatattgacgtataaattcaattggtggtctcactattacaaaaataaataatgcgataccaatggcaatagttaaatgatgaactttttcatcagtcgttagtgcgtggttattaatcacgccatctattgcatatttaattaaaagtggtataagcattggtataccaaacttaattatcccaacaataatcgttgcaaaaatacgatatttatatggcttaacaaattgcaaatatcgtttaatcatacaatcccccctaatctattgccctatcctattcataagcataaaaatgaatagaggttggatacataatttgtagatgtaaattcttcttacaatttacatttttaaaattaagatatctcaacctctgtcatattcatgtgattaaatacgttgtcttattcgtatgttatattctattcaatttaatctatggatactgtgtccccacacgacagcaaaagttatcatacttctttacatcactaagtcaatataaatgatttaatcagtatttacactttatttgcttaatactgtctaatttttttgtaacgttctttccaaactttgataaaatctggcgcgaatgggcccttcttctgttctatccattgttgaagaatgtccacgttgcgtcttaaaataatatcaatatcatgcggataattcatttgattcatatgttgctcatattcatcttcatctaataaatgatactttccgtttggatatactttaatatctaaatcatagtctatatattttaatgcctcttcatcacaaacaaatggtgatgacaaattgcaatagtaataaattccatcttctctaaacatgcagataacattaaaccaatattctgagtgaaagtaaacaattgccggttcacgtgttatccaagttcttccgtcactttcagtcactaacgtatgatcattgccaccaatgacaacatgatcagtaccctttaatattgttgtttcagaccaaacgcgatgaatcttaccatcatgtttataactctgaattttaatgttttccccttctttaggtatggattctctgaccatactccacaccaccttctgttaatttaaccattataaattatagcatatttcagaaatagtattatataaatacatatttttacgaaataagattttactacttaatgattaaactcggtaatattgctaagtactacaacagagatttacatgtcccatttaaagtatgtaaaatcatcacttttataaatcaacactttaactttttgacattgttatcctatgagatttaaagatatcatttatacatttttaaaattaatgtcactatgttttccgataatattaccaatcatcgaatgttacccatttataaattgataaatctttgacataggtacagggaatgtatattggtctcgatcacttaaattaaaccaaatcatgtcatctggtaatgtttcaatgttaattgctcctgaagcggcgtatactttaatcttccatgttaaatgagtaaattgatgcttcaactcaaaaataggtgtttctactggttgaatgtcatgaccgattttttcagtcattttacgtttagcatgctcactttcaaacataggaaattgccacataccatgcaataatttttcgctacgcttttgcaacagatattgaccttgattatttctaattaaaaagacggattgctcaattacttttttacttacatttttagatttaacaggtaacttttcaaatgtacctttatcaaatgcctcacagttttcttgaactggacaaaataagcataatggattttttggtgtacaaattaatgcccctaattccatcatagcttgattaaacgttccagcttctgtagtaacatacggtaacaattcttgttcgtacgatttcctcgtcgattgtaatttaatatctcgatagtcatcattcaatctagaccatactcgaaaaacatttccgtctacagttgctagtggtacattatatgcaatgctcattactgcagcttgtgtgtatgggccaacaccttttaacgctttaaattgatcaggatctttgggaactaagccttcatatttatcataaacttctttaatcgccgtatgaaaatttcgagctctactataatatcctaagccttcccaatactttaacacttcatcttccgaagcttgactcaaaacttccacagttggaaatcgttcaacaaaacgatgataatagtcaataactgttttaacttgtgtctgttgtaacatgacctcacttaaccaaatatagtacggattggtcgtttgtcgccatggcatttctctttgattttcatcaaaccagtgtatcaaattttctttaaaactagactgctgatacatttataaaaccctttcctcaccaaaattaattgtctttactcataatgtttttattgtacattaaaatcatggttagtatgtaagttaatttagttatttgcgaaattggattataatagtatatataatattatgaaatgagtgaactgatatggacactgcaacacatatcgcaattggggtgggccttacagcacttgcaactcaagatccagcaatggcttctacgtttggtgcaacagctacaactcttatcgttggttcattaattcctgatggggatactgttcttaaattaaaggacaatgcaacatatatttcgcatcatagaggtatcacgcattccatccctttcacaatactatggccaattttaattacatttttaatattcacgttctttagtggaaccaacccatttcatgtatggatgtgggctcagctcgcagtatttttacatgtctttgtagatatattcaattcttatggtacacaagcgcttagacctatcacaaacaaatggattcaattaagtgtgattaacacatttgaccctattattttcacagttctttgtattggtattgtattatgggttataggcttgcatccatttgcagtcttctttcctataatcgctttactaatcatttattacatgattcgttttaaaatgagagccgtaattaagcaacaagctttaaaagcaattcaacaagagcatcaccctgttaaagtatttgttgcgccaacaataaaatttatggaatggcgtgtcgcgatacaaactgatgcacatgactatgttggaaaagcatatggtaggaatgtggtgtttagtgataaagtggaacgtcaaacattatcaacagactccattttatggaaagtcaaaggtaataaagatatacgtacttttttaaacttttcatcaatctatcgttggcaaacaacaacgttagcagatggttctactgaaattcgtttgattgatttgcgttatttaaaaaatgatcattattcatttgtggcaattgcacatgtaacaaacgataatgtcatagaccactcttatattggctgggtatttacagaagataagttacaacgtaaactgtatgctaaataatttcaagttattattcactaaagttaatctataaaaaatgaacaaccgggcagaatgaaaatcaaaacgatttttactctgtccggttttttaatgtaaaactatgaatgcttttacaaaatctaaaatttatattgttgctaacaaactacctttaatgactcgaaatatcaaaatcagtataggaaaacaatatctagatgatattctaattgtttctgattctcacagattaatttacacaacaggtcagctaaacatcatgaagaagtatccgcctcgtctgtactatcatttgaaacatcttgttgattatcagtttgtgtcactttagatgttttattataaattgcgtgtgtcgtataccttgctaatacgaaatttactgcagctattaaacataagaataaaataaagtaaaaatgatatggaatgttttccatacttgatataccaaatatgatagattgtgctataccattaacaatgtaatacattggattcagcattaggatgtgattgataaatacatgatttggatttggtatgaaaataattggtaacaataagatacacaatacacaaaccccataaaatatgatatttattttttcagttaacagtcgaataagaccaaaagtaacggatattaatcctacaaaaatagttgccatcacaataaaatagaatagcgctatatatgatgtttcgaagtttactggtttaaccaatgcactaatcatcgtcaaaatgactagcataataaaacttaaaatagacataataactactggcgtcgctgcggaaatattaaataacttagtcactaaaaagtcattcatataatgatgataagagatataaattgtgaacatcaataccgcaaaaacaatcaatgcaataattctaaataaccatcgcacctctttaacatcggtcaaatgactaaaggaaaatagcgtttcacttgcaataataagtattaaacatgcagctaatacgattagaaaacttttccaactttgttttaaacgttctgttacataccttttagtatgcggtaagtttttaaaatataaaataatattatctagcatctttacacctacaattcaatataaatccatttgtcttctttcaaattggcaatacaatatccattcccaactttagtaatccaaatgttattgttaatattaaacttatcttttaattcttttttatctacaattggataaacaaaaccgtataactgattattatcattgaaaagtaattgtatcggttgttgtgtaacggatgcaacgaaacggttatcatcatcaggaactaaagtttttataactgaactatgctttttatgtaattgactgttaaagtatgcatagtaattactataatttgatttcatatatggcgctaattttttaaaactatgcgtttgatataaacctgccgggttaaaatattctaatttatctttactaacatagtaagtcttattatcggcggtaacacgataatttttactattttcgccagtaattgtaactacactatattttggaattgtgacttgtttatccccttgcatatccacactgccattaaaagcaattccataagctaacttttcgccatatggatctttattttcattttgcatcgtagcacgattcgtaaaatctgttatcgaaataattcctatattattgaaaatgagcaacatcatcaatgctaagcctaaaatagtacctgaggctaaagtccaaaaacgcactaaaaacttaggcggttttgcatgattatagcgctcaacgcgtttgaaattataggtcatctctggtattcttgtacgattctttttccaatctaaatcaaagttttcaatttcttcttttgagtttaaacttaatcgatcacgttcatgttctttaaaagatggaataacttgtttaagtgacccttccattcttaattgaccatgtgaaaaccaagctatatagttactcacttgtgaaattttatcaatatcatcaccaattgacacaatcgttaaattattttcaatataatcatttgttaattcaatcgcacgttccataaattgtggtgttaaatagtcaataacatgatttaaaataataatatttgattttgatgagcgtgcaatacttaatagtaattgagcgtatgccgctttcgaaatatggttaaccggcttcgttttataatcgcctaaatgtgcatattgaataatctgttcagctttatgatcattaatttcatatggaaatagttgaactaactgcgctgtgtaagcttcaacagtttgatgaattaacgattgatcttcaatatatccgtagaacaaatcttcagtacaaactactttacctttatcaggtttaattgcacctgccaacaattgacctaccaacgctttggaagattcaggttcaccaattatacctaatgcttctccttgataaatatgtaaactaatattgtttaaatcgatatcttcagcatcatatccaaaaggtaaataccatttcttattctgtttattcctatagtagtgtgttacttttagtaactttaaaacaattgaacttcccatctattttcatccttctataattgtaataacgctataggtaagccttcttcgggttcatcgctattaaatctaaacccccacgcaaaaataccttttaatctttctactttaaaatattgattactgccatcagtcagtttataaattttaccaatttctatcttttttctgtctactaagtaactttcggcaacaattactttactttgataaacgtcatattcatttaaaataccattcatctcagcttttctcattttctctttataaagttgtatttcgtgtcttaattctggctcagacatctcactcaatttcttctgttccatcggcaataccactttcttctaatttagctttaattttatcatatttatatccttttctcataaggccttcgatagtttttgaaattaatttctgttgcgtgtacttctttcgatttttattataaattttttctaaatctcgttgtaataaatcgtctaaaaccgcttcatcttgtgtaaaatccatttcattcaatacagcatgaatggtttccatttcaaaccctttttgaattaaagattgcattactttttctttaaccttattttgtggtcctttttttgttttagatattttttcagcaatttggataatatcatcaagttcctgttgttctctataaagttctgtaaacatttcaatgatatttggttctataccaagttgataaagtttttgttgataaattttaggtcctttatctgtcgtgcgaatcattgtattttttaaactttccgcataatcttgatggtcgattaacttttcgcgataacaatattcaatcacttcagaaatcgcttgctctgatatctcttctttttgtaaatattgaataacttctttttcagttctctttttatatgataaatattggattgctttgtttaaacctatgcgataatgatcatacttttgaatctctgccatgtcagcagcttcaagttgttgccctttttttaaattaaatttgactaatgtatcgatatctatacccatttcaaattgttcgtctaaaaaaagattaaaacgttctttgtttttcttttgaacttctattttagtaatcttcggcactggatcaccccgttactttctcaagttttatacaatactcttttattattcaataagccacttcctatagcaaatgtttaactttaaatatttttcgatgctaacaaaaaatcacactatcatcttttaaaatgaaagtgtgattacaagcaaatctgtaaaatttattaagcagaaacaattcaactttatcattatgacatttcaattaaaccttctacattatagttccaagcatcttacacatgaatgcaagtatttaacgatttaattgtgacatagcctgttgatattgtgtttcattgatataattttgttgcttcattttttctaagttcgtgcttacacgttgcgtaaaattctctgacatattattgatattatatacgctaggtgcattgactttactagctaaaatagcgctttgtaaaactgttatgtgagacattgttgtactatttttattcacggttgttccaaagtaatggtttgctgcgccctcaagcgtatattgattatccccaaagtaaatattatttaaataaaagcttaaaatttcgttcttattatattgtttttcaactcgatgagctacaaataattcttttacttttctagtaaatgaacgatcattatcataaaaataatttttgacaacttgttgtgtaatggtactaccaccttgcacatctctgtcgctaatcgttgaaaataaagctctagttgtacctttcaaatcgaatccatgatgattgtagaatcgttcatcttccattgaaataaaggcacctttaacatactctggcacgttatcagctgacacaaaactacttttattttcaatttttcttagttcatccacattatcgcgtgtagataaaaaatacatgataccaataaacaatgcgataatgattagaatggttaataatatttttaatagtattcgtttactttttttctttttcggcggtttgccaactggttgataatacgtattatagtgaggttcgtgtttcatatgctcaaaatgttcatttgagtttgagtacctatcgcttcttttcatgcgtttgctccttcttttaaaactcacttagtatataccttgagtttaccagtactatcacaaataggctacactttttgggaaaatcagtccaagggcttacaatcgtatacgccatcatacttacttttttgttttttgaaaagattatagataaatcattacaattttaaatattaatcatgccaaatattgttatattttgtaaaataaaagaccatccctattaaatgccaatagagacgaccttttatttgttattcatttattaaaactaaaatccatatttcatttcaaacgaaaatatataaattttaacaatcgataaccacaatacttctattgtaattgtttaacgatttctcgattaaaatcatctaaatcgtctggtactcgacttgttacaatattgttgtctacaactactgactcatcaactacatgtgcgcctgcatttgataaatctttgcgcacgttcaatactgctgttaacgtacgaccttttaaatcatctgtatctattagtatttgtggcccatgacaaatggcaaatgttggtacatcatttttagtaaagtatttagcaaatgtgccatatcgaccttctgtatctccacgtaaatgatctggtgaaaatcctccaggaattaataatgcatcataatcttctggtttagcttctgcaatgcctacatcgacagtaactttttcaccgtgtttaccaacaacttcactatttgcagtatccccaatcactacagtattaaatccagcattctctaatgcctctttaggacttgaatattctatatcttcaaattcgtttgctagaataattgctacttttttagtcattgaaaatcacatttctatatatcattgatataattactatagacaagtaaatcagtgattaaacatacaagatataaaaaatattaagcgactatcgcgatatctaactctaacacatcttatgtggcatttacttagatactaatttaaccttttcttcaagctgatctaacaatccaatccattcatctatatcttcaacacgtacttcatcaggatttacatgatcgatatcctcaataaacttatttaaacgtgcttttatctgttcgattgtttgctgttcattcataaaaagttaactccttttattttgttttctttttcattattatcctaacagaaattgcgttaaagcgatataatcttagctatatttatgacattcaaattattttgacttttaaaaatccccttttcaattaactaaaattaagagataatttgttacgagtgataatacgaagtggtatcataccgatatgaaccaaatagaaagaaggaagtttaagacgatgaatagcgtcaaattgaagcaacctgttagcatttacaatgatccatgggaatcatataacgatgttaaagaacatggccaattaactttaagtaacatcgaatttacaactacaaatctttgtaatatgcgttgtagccactgtgcagttggttatactttacaaactgtcgaccccgagcctttagatatggacttaatttatcgtagacttgatgaaattccaaatctgcgaacgatgtcaattacaggtggcgaaccaatgttttctaaaaagtctattagaaatgttgttaaacctctattaaagtatgcacatcatcgaggtatatatacacaaatgaattcaaacctaacattgcctcaagatcgttatttagatattgctgaatatatcgatgttatgcatatctcacataactggggaacaactgatgaattcgcaaatgttggctttggcgcaatgaagaagcaaccaccgttaaaagctaagttaaaattatatgaacaaatgatttcgaatgcacgtacattatcagaacaaggaatgtttgtatctgcggaaacaatgctcaatcaaagtacgctaccacatttacgaaaaatacatcaagaagtcgttcatgatatgaaatgtagcagacacgagattcaccctatgtatccagctgactttgcaagtcaattaaatgtgttaactctagcggaaatgaaaaagacaattcatgatatattggatttcagagatgaagatatttggatgttatttggtactttgcctgtgtttccatgcttaaaggatgatgaagatcaaaagttactatcacgtttaagaaatgctaacaatgtaacgactagaaatgacccggatggccgtagtcgtttaaatgtcaatgtatttacaggtaatgtaatcgtaactgatttcggagatgaaacaggtacaatttcgaatatacaaaaagataaattaacagatgtatttgataaatggttatcctctgatcttgctaaatcattaaattgtcattgttccgagtttagttgtttaggaccaaatgttcttgttaaaaatatgtactatccgaatatggattttaaagataatgagcgtcatatgcacaaacaaccacaaattatacaattttaaaaactcttaattatgcggagaagcactttatcgataagtagtctccgcatattttaatgctattataaaataaaaaacaattaattgctggcagtactctactttaataataaaggtcatttaataggactaatagtctataataaaaaggttaaattttaactaaaagcataaacgtgcataatcaaaaagacagattgtaggtggaatattcgaacataacagttcaattcatccttaacaatctgtctttatatttttagtctctaatatgttgcacttgagctaaatattcaattgtttgtttactttcaatgcgacgtgcttttcttcgttcaacacgttgtggtgctgtatcataaaaccatttttcaacatcatcttctggatatacaccaggtacatgtttaggtttgccttcatcatctaacgcaacaaatgttaagtaacttaatgcagctaaatcatgcttgttattaaatacatcgtcaattctaatttgaacgaccacttccattgaactagtcccagcgtatgaaaccatcgctacgtattgtaatatgtcccctgttttaatcggctttaagaaatctactgagtctgtagatgcggtaactacttgcgcaccagcatgtttcatagctgtgattgctgcaatttcatcaatattagccatcaatgtaccaccaaacattgtatgatggtgattcgtatcttgagggaaaacttgtctatttttataacattttgattctgacatagatttcattggtctgtcctgatttgtcattattttatctcccaatctatactttaatcacgtatttgacctttaaatacatgtttcatttcctactcagcacctcaaaataacatttattaaaatgttgatgcccaatttccattttcaaatactagttcttttgaaccatcttcgaatatgccataaatagtcaaatcactactaccaatcatgaaatcgacatgtacgtttgaatcatttaatccgcttgcaatcttttcctcaacagtcatttccgttccaccttgaatattaaaggcgtaagcagatccaatcgctaaatgacatgctgcattttcatcaaataaagtattgtaaaaaatggtattacgatttgatatcggtgaatcatcaggtactaacgctacttcacctaatcttcttgaaccttcatcggtattgattaaatctttcaataccgcttcacctttttcagctgaaaaatcaataatttctccatctttaaacatcaatttaaattgatcgataatcgttccattataacttaaaggcaatttattagtaacatatccatctactctatttcgatctggtgctgtaaatacttcttcagttggtatattagcaataaaagcttgttcctcgccgttaacataacttgtagcatcttcccagatatgatttttcgctaaacctactgttaaatcagtaccttcagatacataatgcaacgcatggtaatttttttgttgtaacttttgagcgtaaacacttaaattagcgatgtgttgacgccaattttcaactggatcgttaccatcaattcgcacaatatcaaatacctcgtcaataaacttaatatatgcttcttctacagatagttcaggatatactctcttcgcccaagctttagatggaaaagcagctacgacccatggaaattgatttttttgtacactttccatatatcctttaaatgcgcgtgcgttttgttgttgaaatgcttgtaatttttggctatcgataccatccattaaatcaggatcttcactaataagtgctaaattagcagcgccacgtttaacgtaatccattctcgcttcaacatcatatgattttatctcatgattagcaaaatgttccacagattcattttcaaattttaagcgttttaaggttggatcgctatatacaacacgtacatctgaagcgccacaatgatatgcttcttctacaattaaatgcgttaattctaatgtttctactgatgatctaataaatactggctgttttggttgaacattcataccaaccttaactaatagttcagcgtattgttgtaacttttctttgtaattagtcaaaattcccactcctagtcgtgtcgcaattgtcctaaagcgtcagcaatagctgtcacttcacttggcgacaatctttctcttgattgaacaaaatcatatatatctgttaattcttcttcatttgcatttttatatttttcaggatctaataatccttgattaacaatatttaacttctctctaatagctaatactttctcttcatttgtcatagccacaatgttcacctctaataatagttatgttatcaaagtatcacaatttaataaactttaatagaattttatataatctgctttcttattgtttaaagtcgctataaaatggggatataactacatagtttggaggaatcaaaatggtagatgtagcatttgtctgtcttggcaatatatgtcgttctccaatggcagaagcaatcatgcgacaaagacttaaagacagaaatattcatgatattaaagtacattcaagaggtactggtagctggaatttaggagagccgcctcatgaaggtacacaaaaaattctcaacaaacacaatattccatttgatggcatgattagtgaattattcgaagcgacagatgattttgattacattgtggctatggatcaaagtaacgttgataatattaaatctatcaatcctaatcttaagggacaattgttcaaactgttagaatttagtaatatggaagagagtgatgtaccagatccatactacacgaataattttgaaggtgtatacgacatggtattatcatcttgtgataatttaatagactacatcgtaaaagatgcaaatttgaaagaggggtagttttttatggaaaataaatttgttcctggtattttaattggtgccgtaattggtggtgcaattagtttagctgataaatctacacgtcaagctttagttcaatcagttaaagatgcaaaaaatggtaaccgcactcgtaagccttctaaagtcagcaagattaaagacgaagttttatactggaaagatgttgttgaagaaattcgtcgtaataatcctgaattagaacgttcattaaaggatgcgaaagaaacatttgttaatagaaaaaatcaacgctaagatgattttgtttttataaggcaatacttaacaatttggtgtacgcctttcatagttatcattattaaatgataatacaatgattggccaaactacattgtttcagtattgcctttgttttaattttaaatcaaaatagcctatgaaagatttaaatcaattaatttctataatattatcatttttaaagcatatcattgtttagtttttttataattggataaatactaatagttactttataaaacattacatagagaaaggttaaggagtgcacatgtcgaaaaaggatcactcttcttcaaaataccttaattctgttaaggaagcgcaagaggagtcaaaaaagaaaaataaaagtaatcccaaaattgatgttgatcgtacatatattgaacctcaacaattccaatctaagaaacctaaaaaagatgatcaggttttcttcttatcaagattaaataaacctgcaaaatataagaaagactctaatttcttatcatatctcatctatcgcataggaaaagatgatgcctcaggactagcagcgcaaatgacttaccatttcgtacttgctatgttccctatgttgcttttcctattaacattattaccatttttcaatattaagcagagtcaaattactaatatgttaagcaatgcacccgctgaaacatctactctaattaagagtgtaattggtgatataactcaaaactccagtggtggcttattatctatcggtttgattttagcaatttggtcagcttcaaatggaatgactgcaattatgaattctttcaatgttgcttacgatgtagaagatagccgtaatggaatcgttttaaaactactaagtgttgtcttcactgtagttatgggcgttgtgtttgtagttgctctagcattaccaacgcttggttctgtaattagtcatttcctattcggtccacttggatttgacgaacaagtgaaatggatttttaaccttattagaattgtgttaccaatcattattatatttatcatatttatcgtgttatattcggttgcacctaacgttaaaacgaagcttaagtcagtattaccaggtgcagtatttacttcaattatttggttagctggttcatttggttttggttggtatatttcaaattttggtaactattctaaaacatatggcagtatcgcgggtatcatcattttattactatggttatatatcacaagttttattataattgtcggtgctgaaatcaatgcaatcattcatcagcgtagtgtaattaaaggtaaaacacctgaagaagcagcattagaacatgatgacaataataaaaatcattataatgagaacactagatacgaatatgatgaagatagtaatgcaacacatcaacgtacgtatcatgttgatgaacatcctagtgatacctatccagaagatgataaaaatataaaagacaaaatcgttgataagcttaaaaaagactaaacaccaacaaaacagaggttttcgctaatgattgcgaagacctctgttttttggtgtctatttgatgttatattgtgattggcgtaagtaacttttcttaattcgatacgaactattgaattaaattatgttggaatgcatagatgacagcttgtgttctatcttgcacttctaacttacttaaaatgttactcacatgtgtcttaaccgttttaatagtaatatgcgatgcactagcaatttcttgatttgagtaacctttcgcaatcaataataatatttccatttctcgttctgtaagcatttcatataactctgcgcgctttttcatacggttacgcattttcactaaaacttccggttcaaaaacagattctcctctagaagttttacgaactgcatcggcgatatcttttgcacttgttgtttttaaaatgtaactatcgacacctgcatctaatgcacgatatacctctttatcttcaataaaactagttaacattaatactttaatttgcggtaaatcttttttaatctgagtcgtcgcttctacaccatccatgtcttccataagtaaatccattaaaattaaatctggcttcaactcatgggctttggcaattgcttctttaccagaagcgccttcaccaactacttcaatatcactttgcgttgatagataacttgaaattcctatacgtaccatttcatgatcatccacaaacaatactttaatcgtcatacgaatcctccttatttaaaggtgctttcacctcgatacgtgtacctgaatctggcaatgatacaatatggaacgttgcaccaatttccaaagctctttcacgcatatttttaagtccataactttgttctaatttttcatcaacattaaaacctttaccattatcttgaattctcaacaataaataatcgtctttattaaacaattctactgtcacttttgtaccgtttgaatgacgcaatgtattcgaaattgcttcctgtgtaattctgaacaaatgatcttcaatacctttaggcactttaaaatcttgtatttcatgcacaactttcattggcacttttttttgtaaatcaataactaaatctttaataccctcacctaaagatttgtcttttaaaccaagcggtcttaaatgtaacagcaaagcacgcatttctaactgcgaatcttgaaccattttctctaaaatcggaatttgttggtctaatggtggttctaacttcgtttctttgatagcagaaagcatcatacttgccgcaaaaagttgctgactaacagaatcgtgaagttctcgagctagtctttgacgttcatcttcaataatctttttaactttcacatcattaatattataattttcattggttaagttttgagttttaagtcgcaacttatgcaattcttgatttaaaggtacgagtgtatggtataaatctaacgtttcactatatatttctatattttgatcattaatgccaactgtttcgccttccattgaacgctcaatttgcgtcttaatccaatcattttgctgattgattttgtatgcgagtaccgaaccaacaataatacacaataatatgatgatgagatttaaaaataaaaagactggtattccgaatatttgtgtataaaacataccttgaaaatagatgatatttacaaaaactttatcgatgaatagaaatgcagctagcatgctatatactaagatgagcattgaaccaattgttctaatgtagtggttcatcgataaatcacctctacgtctccgataaacgttgatacgtagatattaactgtatagttatccggtttcatcatttcttcaatatgaatattgttattttcaactttatatgatttttcattcacgtaagtacttccataaaaagcagctacatgtaaattaatattgtaattaaccggcaatataacctgcactttacctaaaatgtgtctaacaacaatggtattattttccttaatatttgcagcttttgttaagtcaatatgtaggtcgccaattccatgttgaatttggacatcttcccacttatatacataaactggtgtacgttgctcaccaaaccacttttgtttaataaaagatggtgaagtcataacctcatccgtcgcaactactttttttggtttaaatttatgtattaaataacgcacaataagtagtaataaaaagacgaacaagatgatgattgtatacttattagacaataatgtgaatgcaattaatagcgcgcctatccaaaacgctaaaaggccacgtattttatgaaaataaagatatcctacataaactaatacacatcccaataatagaacgagtaaaaagccaattttttcaaaaaatatgtagtaaaaattggcaataatcattaatgcagtaaaaatgatcaacatttgcgttgatatatatttgtgtgtcatgtttcgccgcctttctatgccacagcgttcatataatttattagatacgatgttttttctgttgctattttttcagttgaagtttgttgaatttgagtttcaatttgtgcataatatgcttcaactttattcaactctgatttaatattttcaatttcttgattattgatttctcttgcacattgaatttgaaatgcttcagcaatatcaatatatttattttctaatgttagcattagactgtcaattaacttgctaagttgttcttttttagtaattaaataacgcatataatcatctaaatttttcattttttcatctagcattaaaaggtagtgcttgatattatttcttactgttgctctcaaaaactgttcaatataacgttcaacatagttcataactatcaccttttataataagttttaaaataccaaatgcgctatgtatcttcgttgatgtcgatgatatgtttgcttaaaaactactttattacaacatatttttgaaatgacgcattgattgtgttcttaattattataaaacagttccgaaaccaatatgaataggctccggaactaaatgatgttcatactttagtcttagtatatgttgaactattcttcttcaatttttgtcgttaaaatcggaccatccttagtcacgataaccgtatgctcaatttgagcaacaaaacttttatcgctcgtttcaaaagcccattcatttttaccttctgtaacaaatgatgcatttgatgagataaacggttcaatagctaataccataccttcagttaataatgttttgtcttttggatcaaagtaattaagtacatgtgctggtgcttcatgtaatgataaaccaacaccatgacctgttaagtttttaatgactttcaaatcattttgtctagctgtattatgcaccgctttaccaatgttacttaacttagtacccggttttacttttgcaattgcattctcaaatgccatcgttgctacgtcacatactttttgtttcattggatcatctgattctccaacgacaaatgaaatgcctgtatctgcataatagccattcttcaaagccgatacatcaatatttactaaatctccttcacgaatgacacgcttacttggaatcccatgtgccacctcttcattgacactaatacacgtttgaccaggaaaattttcatcatgaattggcgcagaaatagcaccgtattcttcaaataactctttcgcaatattatcaagctctttcgtagtgatacctggtttggttgcagcttgcattgtattgcgcactttagcgcatatgtatccaatttcttttaacgcttgtaattcttcttctgtttttacaatcattttatcccgttccttttttatataattataacttattatagcaaaaattctttgatatactaaagatgttactttagtattttggaaagtgagtgagacatagtgtgataaagaaaaaatatttctttatcgttgtaccccaacttgcattgcctgtagaaattgtagatccaatttctctatgttggggccccgccaacctgcacattatcgtaagctgacttttcgtcagcttctgtgttggggcccacaccccaacttgcacattattgtaagctgacttttcgtcagcttctgtgttggggccccggactataattgaaaaatgcttgttacaagtgcattttatttcagtcaactactaacaatataacattgtggagcccagaactttgattaatgtatatgaaaatcaaagtaatgcttaagtatgattatttcaaatattttacatacatgaacttttccaatgtacgatactattattataaagcgctcgctaagattttacgatgattagaggttaaaaaatgaacgatcaatggtataaacatttaattggtgccagaacaattaaaactggtattgccatttttttaacagctgtcttttgtatggcactagatttaacacccatctatgccattttaacagctgtagtcacaattgaaccaactgccaaggcatcacttattaaaggttatcgtagattacctgctacggtaattggtgcaggctttgcagtattatttacatatttattcggcgatcaatcaccttttacatatgcattgagtgcaacgttcacgattttattctgtacaaaactcaaattgcaagttggtacgaatgtcgctgtactaacatcattagctatgattccaggtattcatgatgcctacatattcaactttttgtctcgaacattgacagcaattattggactcgtgacatcaggtttaattaacttcatggtgtttccacctaagtattatggtcaggtcgaagaaaaattaagtaagacagatgccttgatgtataaattattttacaatcgctgccaagaacttatcttatcaagactgcaatctgataaaagcgaaaaagcatataaaaatattttcaatttaaacaatcaagttgaaacgttaataagttatcaacgtgatgaattaagctatcataagaaaaaagaatgtgattggaaattactcaatcaattaactaaacgtgcatatacgaatcgtttgtttatcactcatttatcaaatatcatttacttgcctaaaaatactcgtgttaacttttcaggtgacgaaaaaatggcattgctaaaaattagtagtagcatcaaagatatattttatgatggtacttttaagagagaagatgattctgtagaaactttacgttcgactataaaagcacttgaaattagtggtgaaaatcaaattaaaagtcatatactatacgaagttctaatgatttatcgactgctagacagcagatatgcttaatttaagtaccttatgctaattggcaccatgggagtgggacagaaatgatattttcgtaaaatttatttcgtcgtcccaccccaactcgcattgcctgtagaatttcttttcgaaattctctgtgttgggacccacaccccaacttgcattgtctgtagaaattgggaatccaatttctctttgttggggcccctgactagaattgaaaaaagcttgttacaagcgcattttcgttcagtcaactactgccaatataacttcgtagagcatagaacattgatttatgtccccgcctctttttatcgtatatagcatgtccctttttaaaattacaagcataaatattcagactcaaatatagccacacgcctaaactacggagggatgtggctgtcttttttgattgtaattatgtatcagatttaaatcattaatataaagaggctaattcattaataaatttagtaaaatctgatttagcaatatttatccttaatgaaataccagattctgttgccatgtttgaatgccttaaaccagaatcaaaatcaatataaatacaaagcagttcttgattaaaatcaataattgtaaaatgtaaatcaggttctataaaatatatttcagtaacaggattgtcgtaatccatatgtttcaaattgtccatgtcactatcaaaaagtgcaaattcaaatttaacttcttgatcttcgaaagttgcactagtgtcgaaataataaattttattatcttcttcgataactacatcttttaaaataaatgttatcgatgttttgctatgtaaataagatgcatctcttaaaatcactttagtgggcttcatcgtcaaattcctttcatcattcattttttcatgttgcataatcaccattactattgataattctaggatagatactcattgtataataattattcactagaacaaaaaaacacacatcaatttggttgtttccatccaaaataatgtgtgtgtttatacatatatgatttattactaaacttcatcgtttatcaatattaaatccattgatgcgatgttcagagttaacgagatttcttctgtctatttgctctgtctattaatacttgtttcgcttgtatttccgcttcattatctatttctttaggctcaaacggaatccccttacgttcacaagctttttctaacagataatcagtgatttcgtaatttttaggtaaaattggtccgtgtaaataagtacctaataaatttttataatgaatgccttcttttttatcttcatcattattaccataaccaaaagtaacatgaccaagtgtaccgaaatcatgatatgttctaccaccgtgattttcaaaacctacaatagttccaaaagtatcactttcgataacaatatctcctgttaatcggtttgtctttgattcagtataaaaatctaaaatacctaacccttctaattctgtaccatcaggcgtgatatatttttttcctaaaaattgatagcctccacaaattgttaatcccggcataccatcttcaatcgcttctttaagtggtgtcttaattttacttaattcttttgttgctaatgcttgttctctatcacttccaccaccgataaagaaaatatcacattcatcaaaggtaataccttctgtttcattgatttctacgacattaactttaatatttcgttttttagcacgttgtcttaaagcaataatatttcctatatcactgtataaattcaatttatctgacataaaatgataaatagtcaattcatgcatattatgattgacctccttcaaacgaacggtttaattgttcaagcataggcgctaatgatgtatagtttggtattgcaactgtgaaacctttataatccatagtctttgccgttgctttataaatatcacgctcaactataattggtacttcaacctctgctaacttcaatcgcaattgaagttcttctgctcgtgtacctgtcacgatgatagcttcaatttgttgcttagataatttttcaaaatctgcatcataaatccatgaagtatctcgaccatctgcagcgttatcatttagcgaaataacatacactttttcgccttctaattgttcaccaactgataaacttgcattcattcctgcaggatttttagctaaattgatcatcgcttcttttcgttcttttttaaagtactgcatacgaccattgtctgatgtatacgtttcaaagccatttttaattgtttgttcatttaaccctagctctcttaaaacagtatatgctgctaacgcgttataagcgttaaagtcacctgcaattttcatatcatatttttcatcattgatatttaaatataaaaacggtgccacatcaaaacttgatatttcatattttgcttgctctcgtttgaaaccacactgacagtgataatgaccaatttgattataatgaatataatcgtattgcaataagcgaccacagtttggacaatatctactttcattcatcgtactttgttcaaattcatgggcatgtgctttcataccatagtacacaatcgtatcacttgcgattttcaaacgactcacaaatggatcatcagcatttagcaataatttgatgcctttattactaattgtctctgcaatgttattaaccataatatcaatttcaccgaagcgatccatttgatctctaaagaaattagtaaataccatcattgaaggtgtaacttcttttaacacacgtggaatcgaaccttcatcaatttcgattaccgcaattttagtcttaggtgttgattgcatgatgaatgcagaagttatacctgcagccatattagcaccttcattattgtgtataatttgaatattatttgcttttaaagtatgtccaattaagtttgaagtcgttgttttaccatttgttccactgataaatacaatatcatcaacttgctctgctaattttcttaatacatctgtatccacttttctagcgatttgtccaggtaaatctgttcctcttttacctactgctctacttgctttacgcgccaatttcgctagatggattgccgtccactgtctcatgtgtttcctcctcaaatttccactcgcatcattataacatgacaaggcaacttcaaaaaagtttctcaatcacaaattgatacagtgtttctaaattataatcattctcatttagataattaaaaatgatatttattctcaattaaatatcgctaaatgatacattttctcaattagattgctaaaataaggtattaaattataattattattatttacaattgagaatgagtttgttatactaagtttaattcatagtaattttaatttacaaataagaggtgtatcaaaatgttaagtaaaaatttattagaagcattaaatgatcaaatgaaccatgagtactttgcagcacacgcatatatggcaatggcagcatactgtgataaagaatcgtacgaaggatttgcaaacttcttcattcaacaagctaaagaagaacgtttccatggacaaaagatttataactatattaacgacagaggtgcacatgcagaattcagagcagtttcagcaccaaaaattgacttttcaagcatactagaaactttcaaagacagcttatctcaagaacaagaagtaacaagacgtttctataacttatctgaaatcgctcgtcaagataaagattatgcaactatctcattcttaaactggttcttagatgaacaagtcgaagaagaatcaatgtttgaaactcacatcaattatttaactcgtatcggcgatgacagcaatgcattatatctttacgaaaaagaacttggcgctcgtacattcgacgaagaataattaaacatcactacaatagacagataaatatcatacgacatgataggcatttgggtcacttacaataacccaatgtctatattattttgctttacggagatcactagattcattttctgaatcattgatctgcgttttttcattttcaaggctaattattgtatttttagtcatttattttttaaactactaatgttaataactctaaatttgatgttgaattaatttgaccgattttaaagcatatcatcatttactttttaatcagagttacatccaaatgatagatttcacgttataccttcacgtataatattatgtatcgtttgtaagcaaatgactaaaagtctattaatatatacatttaattaattgaaaggattgactacatgatacaagatgcgtttgttgcacttgattttgaaacagcaaatggtaaacgtacaagtatttgttctgtcggaatggttaaagtcattgatagtcaaataacagaaacatttcatactcttgtgaatccgcaagactatttttcacaacaaaatattaaagttcatggcatacaaccagaagatgttgaaaatgcacctacgtttgactacgtatttccatatatgatgcaatttattgcagatttacctgttgtcgcacataacgcggcatttgatatgaacgtcttacatcaaagcattcaaaatattggtttaccaactccaaatttaacttacttttgtagttatcaacttgctaaaagaaccgttgattcgtatcgatacggtttaaaacatatgatggagttttatcaattagattttcatggtcatcatgatgcattgaatgatgccaaagcatgcgcaatgattacttttaggctactgaaaaattatgaaaatttaacatatgtaactaatatttatggtaaaaatctaaaagataaaggctaggactaaataaaatactcccttcaaaagtaagcattgtaaaaatgtaaactttgcagggagctttattttatataaagtcatatatcgtcatatttttataagttgattgttctaaattacctacagtgacaccaataagtcgaattggtacatctgggtcttttaaatcgttataaagtaaatatgcaatattataaatatcttcttcagaactaaccgaatctcttaaactcatctgtttagatagcgtttcaaattgataagttttaattttaaccgttacagttttagctgacttctgtaatttatttagacgttcagctgttttacctgacaattcccatacttttcttaaaatctcttcatcatcattcacgtctgttgcaaatgtgcgttcagtccctactgattttcttactcttgatgatttcacttcactatggtcaataccgcgtgccttgttatataaaccccgacctctttttccaaacaaacgtattaattcaaattccgttttctcatataaatctctaccgttaaaaataccattatcatgcattacttttttggaagctttacctacgcctggaaaatctccaatatccaatgtcatcaaaatatcatggacattttgataatcaatcacagtcaaaccatcaggtttattcataccactcgctaatttagctaaaaatttgttataagaaacacctgcagatgctgttaaatgtgtctgctctagaatatcttttctaatatactgagcaattttcgaagcaggaaggtctggtctcactaattctgtaatatctaaatacgcttcatccaatgacatcggttctaccttatctgtataacttcggaaaatagacataatctgcgcagatgtttctcggtaagcaccaaaattacttgtgacaaagtatccatttggacataatttatgcgcttgtgacataggcattgctgaatggacgccgtattttcgtgcttcataggatgccgtagagacaacacccctactgcttgctttaccaccaacaatgactggtttccctttcaatttggggttatctctcatttcgacttgtgcaaaaaaatagtccatatctatatgaataattcgtctctcagtcaagtgctcacctccctactaatttttacttttataacgcacaaaaatatctcaacataattatacgctgtgtacgatttttttacataaatcttgcacttagcgataactatattgagataactacaagttgttataaaatcaattgctatttaagcatgatgatgaagacgattgagtaagaaaacataggtaatctgaaataattcaagcaaattcattttgttggtattatcatattaaaatttattattgagtcggcttttgatgatacaaataaatactatcttcatcttgttgaacatatttaaaactactagatattgttaatgcaacaagcagaatatctataaagcaataagcggtatgcatactaaacataaaaataagtgatgaataaccaaataccttaattaaaataagcaagccagtacttaataagattagtggtgacagcataataattgagaattgccatttgttgaagcaagcatctgctgtttggaataagattctgtctttttttatattaaacataggtttgctatcttttttaaataaaagaaataatgctctatggataagttcatgtaaaatcaataaaataatgaatccagcaaacccatatacaagattgatgatgatattttgatcgacaaccgctgtgacacctaacgcccacttatacgtaaataaaatcacgaataacgcaataacaagttgcaagataataaaccttcgcatttgaaaattatttgtcgttaaatcaattttatgcattaccaaccctcccgatcatgacattcttattcttctttaaatatagtatacaatgtcacatttaatttaaaaagttcatatcaagaaagtaaattggctgtaataaaattttaatatacgacttctttcttcacttattaaggcgaaattttatctcaaatcatgtgcgctatttcaaattgaataatgccactgtctcaacatgtgttgtttgtggaaacatatctaccggtgttacctcttcaagttgatatttttcagctaataataatgcatcacgttgctgtgttgcgggattacatgaaatatagacaatacgcttaggttctaatgtaagcaaagtctgaataaacgtttcgtcacagccctttcttggcggatcaaccattacaacatctggtttaatcccttgtgctttccattgtaaaataacttcttcagctttcccacagacaaaagttgtattattgcattggtttatagtcgcattttgttgtgcgtcttcaattgaagaaggtactacttcaacaccgtatacatgttttgcatgtggtgccatatatagccctattgttccaataccacaataggtatctaatacaacttcattacctgtcaattgcgcatactcaattgctttattatataatttctctgtttgttcagaattaatttggtagaatgactgatcacttattttaaatgtactatctgttaattgatcaataattgtatctttaccatatagcgttatagattgacgtcccataataacattagagtggctatcattaatgttttgtttaatgcttgtcacattaggaaatgcatctaatatcttctcaacaacagcatttttttgtggccactttttaccattagttacaaaaataatcatcatttcgtctgtatgatatcctgttcttacaaccaaatgtctcattaaaccttttttcaattgttcttgataaatacttacatttaaatcttttaaaatagatttaacttcattcatcacttcttgatgttgtgaatcttgtattaaacaactttccatgtcaataatgtcatggcttctttgacgataaaagcccataataacttcattctgttcattcttaccaactggaatctgggacttgtttcgatatctccaaggatctgtcatgccaactgtatcgttaatcttagaattatcaaaatgcgcttttcgctgaaacaaattaatcacttgttcctttttcatttcaagttgtgcttcgtatgataagtgttgaagttggcacccaccacaacgttcataatatatacatggcggtgcaacacgattctcacttctcgtatttatattaagcaacttacctatcgcaaagttcttttttactttgataattttatattcaatttgttcattaattaaagcttgtggtatgaaaataggaaagcgatctatttttacaacaccatggccttcatgcgttaaatcaacaactgttcccgtttttatgtcatttttagctattgcttgcaaaattttacctccaaaatgaacaggttaggaacaaaattatgcgcttcctaacctgccattatatatttcactatttctgtttattcttcgattaaattgtcatcaacatgatcattatttattaactcttcatttacaatatcattaggtgcaaagacatctatatgacgttctagatttaagaaattcgctggtaatttaccaccatattctccatctacatttagttgtaagtctgtgaatgatgaaatattaattgcctttgctttttcataaataactttaggatgcttagtatgttctcctcttgaagctaaagtcataatatgaccaagttctgcaaggtttgatttttcaactataattaacgtaaaatagccgtcatctaacttagcgtccggcactaatttttcaaatcctgccattgaatttgttaaacctaaaaagaataataatgcttctccttggaaaacattaccatcatattcaattcttaaatctacagctttcatttgaggtaacatttcgaaacctttgatgtaataagcaaatggaccaacaatagatttcaatttactcggtgtttcataagagacttgcgtcaattgtccgcctgcagctaaattaataaagtatcgattattcattttaccaatatctactttagtagaatgaccttcaatgatgacatcaagtgcccccatgatgtcattaggtatatgcaatgcacgtccaaagtcattaacagtacccataggaatgacacctagcttaggacgattaggcttttctgcgataccattaactacttcatttaatgttccatcaccacctgcagcgattaatacatcataattttcatgcatagctctttctgcttcaagtgtggcatcacctattttctcggttgcatatgcactcgtttcatatcccgctttttctaattttattaaggcatcaggtaattctcttttaaatagctctttacctgatgtcgggttataaatgattctagcacgtttcctcatatcttatccctctacttaaaattcatatattttaacttcatctttgtttcgtctaatagggagtgggacagaaataatatttaacaaaatttatttcgttctaccccaacttgcattgtctgtagaatttcctttcgaaattctctttgtttggggccccaccccaacttgcacattattgtaagctgacagaaagtcagcttctatgttggggccccgccaacttgcacattattgtaagctgacagaaagtcagcttctatgttggggccccactagaattgaaaaaagcttgttacaagcgtattttctttcagtcaactactgccaatataacattgtagtgcctaggacattgaatttatgacccaggctcagtcttatttcatcattcttaatatcgttaaagaccaacttgtatcttaaacaaatactatctcaatatgtacaaagcttgttatttattcagcattttttgccgttcttcattatatagacttcgtcagttatgctattttacctttaaaatgatgttgtaaatataatgttgtctttatacaaaaatgttttatacctttttattatacagtttgccttaatataattaaagctaacgcattaataaaattaatatttttaccattaacatgtacaatgaataaagttaaaagtaatatgacttctatagatataaataaaccctcgattgcatctaagtcagcaatcaagggtttattttttaaatcttcatagtttgatgatttaaattatcttttatctaattcttgttttaatagttgatttactaattgtggattagcttgacctttagacgctttcataatttgaccaactaagaagcccatagctttgcctttaccatttttgtaatcttcaactgattgttcgttattgtctaatgcttcatttacaaattttagaagtgttgcttcatcagaaatttgaactaagccattatcttccataatctgtttagcattaccacctttagctgctaactctgggaagactttcttcgcaattttactgctcattgttccgtcttcgataagtttaatcatacctgctaaattttctggtgttaatttagtatctaataattctacttgatttttatttaaatattcgtttacgccacccattaaccagttagatgttaatttaacatctgcaccgtgttcaattgttgattcaaagaaatctgacatttctttagtcaatgttaatacgtgtgcatcgtatgcaggtaaacctaattcatttacatacttagccttacgctcatctggtaattcaggaattgtctgacgaacacgctctttccaagcatcatcaatatataaaggtacaatgtcaggctctgggaagtaacggtaatcatcagaaccttctttaacacgcattaaaattgttttacctgtagattcatcaaatcgacgtgtttcttgtccgatttctccaccatttaacaattcttcttcttggcgtttttcttcatattctaaacctttacgtacatagttaaatgagtttaagtttttcaattcggctttagtaccaaatttttcttgaccatatggacgcaaagagatgttagcatcacaacgtaaagatccctcttccatcttaacgtctgatacaccagtgtattgaataattgaacgtaatttttctaaatatgcatatgcttctttaggtgaacgaatatctggttcagatacgatttcaattagcggtgtaccttgacggttcaagtcaactaatgaatactcacctttatgtgttgacttaccagcatcttcttccatgtgaagacgagtaataccgattcgttttgtttcaccgtcgacttcgatatcgatatatccattttcaccaattggttgatcaaattgagaaatttgatatgcttttggattatctggatagaaatagttcttacggtcaaacttagattctgttgcgatttccatatttagtgccattgcagcacgcattgcccagtctactgcacgcttattaacaactggtaagacacctggatatgctaagtcgataacatttgtatttgagttaggttctgctccaaaatgcgctggtgatggagaaaacatttttgagtccgtttttaactctacgtgaacttcaagtcctataactgtttcaaaatgcatgatttccactccttataatttttcataaacgtcatgtaaattgtattgtgtttcatattgataagcgacacgatataacgttttttcatcgaatggtttaccaatgaactgtaaaccgattggtcggccatttgattgtccacaaggaacagaaataccaggtaatccagctaagtttactggtgttgttaataaatcattggcatacattgttaatggatcatcaatttcttcacctaaattaaacgcagttgtaggcgctgttggaccaactactacatcataattttcgaatactttatcaaagtcatttttaatcaatgttctaactttttgagattttttatagtaagcatcgtagtaacctgaacttaatgcaaatgtacctaagaaaatacgacgttttacttctttaccgaaaccttcagatcttgacattttatataattcttctaatgaatgagcttctttagaatgataaccataacgaattccgtcaaaacgagaaaggtttgacgaagcttctgatgatgcaatcacgtaatatgatggaataccaaatttagtatttggcaatgatacttcctcaacgacagcacctaaagattttaaagtttctacagcgttttgaactgcttcttttacgtcatcagctacaccttcacctaagtattctttaggtaatgcaacttttaatcctttaatatctttaccaatttcagatgtaaagtctacatcatcaactggtgcacttgtagagtcattaacatctgcaccagaaatagcttctaatacgattgcattatcttttacatttcgagtcaatggaccaatttggtctaatgaagatgcaaaagcaactaatccaaatcgagatacacgaccgtatgttggtttcataccgacaacgccacaatatgcagccggttgtctaattgaaccacctgtgtctgaacctaagctaaatggtactaagccagctgcaactgctgctgcagatccacctgatgaaccacctggtactgctttatggtcaaatgggttaactgtttttttgaaataagatgtttctgttgaaccacccattgcaaactcatccatatttaatttaccgattaaaacggcattctctttatgtagtttttccattacagtagattcgtaaattggcacaaaaccttctaacattttacttgcacatgttgtttctaatccgtttgtaataatgttatcttttatacccattggaataccaaataatttgccatccatttgatcttttgcttgtaattcatccaattcttgcgcttttttgattgcattttctttatccagcgctagaaaagacttaattgttggatcagtctcttcaattgcatcatatatatctttaacaacatcagatggtttgatttttttgtcttttattaaagttaataaattctcaaccgattcgtagcgaatgctcatcttacgcgtcctcctcattcatgattgtaggcactttaaattgtccatcttctgtttctttggcatttttcaaagctaattcttgcggaatacctttaattgctttatcttcacgtaaaacgttttgtaaatctaaaacgtgatatgtaggttcaacgccttctgtatcagcgctatcattttgttttgcaaaatctaaaatgctttctaatgtgttggccatttcttccgtttcttcaggagaaatttgaagtcttgcaagattcgcgatatgctcaacttcttcacgtgttacttttgtcattaataaaagcctcctttaagtcattcatcactaaattgtatcaaatttccaattaaaaatctaagtatttatgaggtgctactttaatttcatataaactgtataaacattatcattcgtttatcaaatcattttttatgaaaacaacactcttttaatattagacaacccaattcaatattatgattatgcaattttaattataaaaatttgctcatatccaaaaaatacgaaagcgcttcctatattggtatgcaagtatttcaaaaagaataaatttaattttcctacttttctaaacatttatctttatgtataatgttttcaagtaactaaattataaattaaataaagggagtgtttatcatgcttacaatggggacagcattaagtcaacaagtagatgccaattggcaaacttatattatgattgccgtctacttcttgatactaatcgttattggcttttacggttacaagcaagcaactggtaacctaagcgagtacatgttaggtggacgtagtattggaccgtatattactgcattatcagctggagcttcagatatgagtggatggatgattatggggctacctggttctgtctatagcactggtctatcagctatgtggattacaatcggtttaacattaggtgcttatataaattactttgttgttgctcctagacttcgtgtttataccgaattagctggagatgcaattacattaccagatttctttaaaaatcgtttaaacgataaaaataatgtgttaaagattatttctggattgattatcgtagtattctttacattatatacacattctggtttcgtatctggtggtaaattatttgaaagtgcttttggattagattatcatttcggtttaatattagttgctttcattgtcattttctatactttctttggtggatatttagctgtatcaattacagatttcttccaaggtgtcattatgttaattgcgatggttatggtccctattgttgctatgatgaatttaaacggctggggaacgtttcatgatgtagcagctatgaaacctacaaatttaaatttatttaaagggttatcatttataggaattatctctctattttcatggggattaggttatttcggtcaacctcatatcattgtaaggtttatgtctattaaatcacacaagatgctacctaaagctagacgtttaggtattagctggatggctgttggtttattaggcgctgtggctgttggtttaacaggtattgcattcgtacctgcttatcatattaaactagaagatcctgagacattattcatcgtgatgagtcaagtactcttccatcctcttgtaggtggtttcttacttgctgcgattctagctgcaattatgagcacgatttcttcacaattacttgtaacatctagttcactaacggaagacttttataaattaattcgtggtgaagaaaaagctaaaacgcaccaaaaagaatttgttatgattggaagattatctgtattagttgtagcaattgttgccatcgcgattgcatggaatccaaacgacacaattctaaacttagtaggtaacgcttgggccggatttggtgcatcgttcagtccacttgtgctatttgcactttactggaaaggtttgacacgtgccggtgctgtaagtggaatggtttcaggtgccttagtcgttatcgtttggattgcgtggattaaaccattggcacatatcaacgaaatattcggcttatatgaaattattcctggatttattgtaagtgtaatcgttacatatgttgtaagtaaacttactaaaaaacctggtgcatttgttgaaactgacttaaacaaagttcgtgacatcgttagagaaaaataattcataagtcttaacaaattaaaaaggtactaatgttaatcaaaattatgactaacattggtacctttttattatctttaatttacaattaattactgtaaatatgaacttgcggttctttgtcatcttttgtcttactaattaaagcacgtggttggttaccatctttaatacgaatttcatagttatcgattttatcgaaatatttattcgcttgttcagtaacgtactgtgtaataccaattgtttcagcttgtccatagtaatcgattggtaaatctactactaatcgttgtggctttttatcaacaaatttaactttccctactgcttgtgtgaaattagaaaaatatgattgcaaattatcattaaattgcttgaaattattatttaaattttcatcataatctgctgctgttgaagaaggtaataaagctgatttttcattgatattatgccattcattaagctttgtttgactcttttctgcagtcgcttgagtgataaattcacctggtgtgattgaatcttcacttgattgcttataaattgcaaaatgaattggtatatcttttaaatcatcattttcacgtaaccttgataatatctcactagccatttgtttaccttgctttttaacttcgctatcatctagttttttactaaaagtcggtccatctttttcttttttatagtaataaacactattcatagctaaaccaatcgtcatacctttaatattcttaccttttgtatctccaccaccataaaaatcttgctctaaaatgttagataaataggctggtgatttttctgcaatcttttcaggatttgtttcaccttcgtgtgatggattaagtcctaaattttcattcgctttcttgtcttttttatctttttcagacatcttatcgatttcacgttttgtatacttaggatttaaataggcattaattgttttcttgtccaaaaattgaccatcttgatacaaatatttatctgttggaaatacttctttacttaagttcaataaaccatcttcaaagtcgccgccattataactatttgccatgttatcttgtaaaagtcctcttgcctggctttctttaaatggtaacaatgtacgatagttatcaccttgtacatttttatccgtagcaatttcttttacttgatttgaactattgttatgtttttgattatcttttccagcctggtcatccttatggttaccacaagcagcgagtataaagatagctgtaatcaataatactaatgtacgcttcatcgacatacccctctaactatttaattcattttgcttatctacaaattgttgctctgtccaaatttcaatacctaaactttgtgcttttgttaattttgaacctgcatcttcaccagcaataacgacatctgtatttttagtaacgctacttgtaactttagcaccttgtgatgcaagccatttagatgcttcattgcgtgtcatttgatgtagcttaccagtcagtactatcgttttaccactaaattcaggatgtccttcaatatctgatgttttgatacctttataaatcatattaacatgtttatcttttaatttttgaattaaagcacgaatatcttcattttctaaataagtaactacagattgtgctactttatcacctatatcatgaatttctactaattccgcttcagttaccgttagtaatcgatctatcgtttcatatttttctgctaacacttggctcgctttaacacctaaatgcctaatacctagaccaaataataaattttctaaagagttgtccttagcttgttgaatggcagctaataaattatcaacttttttctgccccattctatctaaaggtaataaatcttcttctgttaaatagaaaatatcagcaacatctttaattaattcgctttgataaagctgttgaataattttagtgcctaaaccatcaatattcatggcttgtcttgatacaaagtgaattaatccttcaacaagttgtgcttggcattttggattaatgcaacgaagtgctacttcgccttcaatacgtactaattcatgtccacaacttggacaatgggttggcatatgatatgtgacagcatcctcaggtctacgttctggaatactacgtacaacttcaggtatgatgtcacctgcttttttcactacaacactatcaccaattcgaatatctctgtcatgaattaaatcctcattgtgcaaagatgctcttgatacagttgtaccagctacttttactggttctaaaatagcagtaggtgtgactacacctgttcgtccaatacttaattcaatatctaataatttagttactacttcctcagctggaaatttataagcaatggcccatctaggagatttttgtgtgaatcccatctcatcctgttgatctaaatcattaaccttaataacaatcccatcaatatcataaggtaatgactctctttggcttgtccatttttcaatatactctaaaacaccatcgatattatttacacgcgctctatttttattcgttgtaaaacctaatttatctaactcatctaatgcttcactttgcgaacgcgcattgaaatcagtgaaatcattgacactatatataaatacgcttagctttcgttttgccgttaatttagaatctaactgtcttaatgatcccgcagcagcgtttcttggatttgcaaataactgctcatcatttttttctttttcttcatttaatcgtaaaaatgaacgtctcggcatatatgcttcaccacgaacttctacatttaatggttctttcattttcaaaggtatcgcatgaattgtttttaaattttcggtaatatcttcacctgttgttccatcaccacgtgttaaaccttgaacgaagtatccatcaacatatttcaatgatactgctaagccatcaatttttaattcgcacatatattcaacgttgccaatttgttcacgtatgcgttggtcgaattttctcaaatcatcctcattaaatgcattccctaaacttaacattggcgtgtcatggttgacttttttgaaagaggcttgggcttcaccgccaactctaactgttggagaatctacagtcttatactcaggatgctcctcttctattttaatcagttcatgaagtaatttgtcatattcactatctggtacagatggattatcctctacatagtattcataactgtattgatttaataaatcatgtaactcgttcacacgagacgataaatcagccatcccttaatcctcctttttttcaattggtgcaaattgcgctaacaaacgttttggcccttgtgatttaaagataatatctagttcgattgagccatttttctcgtttacattactcaccatgccttctccccaggctttatgcatcactttgtcacctacattccaatcagatgacgatacttgttttttcgttgacgttgttcgttgactaaatccgcgtttagcaaaaggttttgccttaggttgtatcgtttgtcgtttgccacttgaatgattttctaatagtgattctggaatttcctttaaaaatctagatggcatattcgactgagggcgaccaaataacattcttgatgtcgcatgagtgatatataacacctcttcagcccttgtaattgctacataacaaatacgacgttcttcttgcatttcgtgatcatcttcactcttaatcgctctaatatgtgggaataaagattcttccatccccattataaagacgattggaaattcaaggcccttagccgagtgcatcgtcattagtgttacgccattttcagtatctgcctcatcaatatcagctactaacgataaatccgttaaaaagttaattaatgactgttcttctaatggggtattttcctcatagtcttttggtactgacataaattcatcgatgttttctaatctacttcgagattctagtgtattttcacgttcaagcatttctcggtagccagacttttgtaatacttcatcaactatttcatgaatttctaaaaattcttgttcttttatcaagctttggattaactcgtaaaaattaagacactcttgtgtcaccttttttgacaatccgataaaatcagcttctccaagtgcatcaaacatactgatattgttttgaagtgcatagttttgaactttttcaacagatgaaggacctacacctctttttggaacattaataatacgttgcaaactaatgtcatcattactattggcaattatacgcaaataacttaataaatctttgatttctttacggtcatagaacttttggccaccaaccattgtgtatggcatattagatttcatgaatgtttcctcaagtacacgtgattgtgcatttgttctatataaaattgccatatcttgatatttcttaccattacgttgatgcttcataatttctcgtattacaaattccgcttcatcacgttctgtcattgcttcatagtaatgaattttctcaccattcgtatttgcagtccacagtccttttggcttacgttcagaattatttttaatcacttcgttagccgcatttaaaatcgttttcgtcgaacgataattttgctctaaaaagattgtattcgcttctgggtagtctttttcaaatgataagatattttgaatatcagcaccacgccaaccataaattgactgatctgagtcacctacaacacataagtttttaaacttacttgctaataatttaactaatgtatattgtgctttattagtatcttgatactcatctacatgaatatattggaatttgttctgataatattctagaacttctggtacacgctcaaataagttaatcgttgtcataataaggtcatcaaaatctaacgcttcattacgcgacaattggcgttgatatccactataaaccgttgctaccatttgcgagtgataatctgtggcttctttttgagcatctgcaggtgttttaagttcatttttcaaattactgatcgcaccgataaacatacgaggttcaaactttttactatcaatattttcattttttaagacgtctttaataacagatttttggtctgtaggatcaattatcgtaaaattgcgttctatacctattcgatctgcatcacgacgtaaaatacgaacacacattgagtggaatgttgacatccaaataacttctgcttgatcacctactaatttttgaacacgttctttcatttctcttgcagctttatttgtaaaagtaatagccaaaacattgtatggtgagacatctttttcgtctaataaataagcaattctatgtgttaaaacacgtgtcttccctgaaccagcacctgccataattaacaatggtccttctgttgtctttacagcttcactttgctctgtattcatatgatttaataacgcattcatttactagactcctttatttttactgtttttaaagcttttttaatatctttataaataatatcaccgacgataattgtatctgcaatagctgccatctctgtcgcttgttgttctgaggaaataccgccaccataaaaaagttgcgtttctgttagatgttctgagacagcttgaacctttgatacgtcgccataaatgccactatactctatatacataaccggtaatcgatacatatgattgaccatttgggcatatgcttctaaatcttctgttgttaaatctgtatttgctttggtatgttttgccactttgctatcagcattgcacacgacatacccttcaaatattacttcttcaaaatctatactatgtccatatgttttaagcgcttctaataatgtaccattgtgaaatgcaacatctgtactgttcagtactgtaggtacaaaataaaaatcaaaaccaggcattacactttcgatatttgatatttcaagtactaaaggcaatgggtatcttcttattctgctcattaaatgaatgacattatcttcagtaacgtcatcagttccaccaatcataattgcatctgtttgagacatacaaatcgcatctaaatcatcatctgaaatatgtttagctgggtctaatttaaaaatatggcgccattttttaatgtcatacattttccgaaactccttttttaacatacatatgattatagcatttttaagtgtcgagttctaaagacttaatatgaattttaagttcttttactctgtaaattttttcgtgaaaaaacaatgattatctaccttattagtgcagatagataaccattgtttatcgttcatttattattcatttgtttcaatattcatacgatctaaaatcattgtataagcatcattaccccattgtaatgaacgtttcactctagaaatcgttgcagtcgatgctccagattcttgttcaatcgttgcataggtataaccttgcttaatcattttagcaacttgtaatctttgagacagtgattgaatttcatttacagtacacaaatcatcgaaaaattggtaacattcttctctattttctaacgttagtattgcatcaaacaattcatctaacgctgcacctcgtaatttttcaatttgcatatcgaaacaacccctataattttattctttatgtcattttaacgcattaatctattaaagtgtagcgatttatattttattaaatctgaatcgttactttatttaattttatgctaatccagcgcgttcgaaaatagtgtcaacttgattcaaatgatgtttaggatcgaaacattcatctaattcttcttttgttaaaacacttgtaatagactcatcttgttcgattaattcacggaaaggtgttttcgtttcccaagatatcatcgcttttggttgtactttgtcgtatgcttcttcacgaaccatacctttattaattaatgctaataagacacgttgtgagaaaatcagaccaaatgttttatctatgttattacgcatattatcttcaaatacagttaaacggtccacaatatttgtgaaacgattcaatgcataatctagtgctattgtaacatctggtaacataatacgctcagcagaagaatgagaaatatctctttcatgccataatggcacattctcataagctgtagtaatataaccacgaatgactcttgaaatacctgtgatattttcagaaccaattggatttcgtttatgaggcattgcagatgaacctttttggccttttgcaaatgcttcttcaacttctcttgtttcggttttttgaaggttacgaatttcaacggcaaatttttctagtgacgtcgcgattaatgctaatgtcgcaatatagtatgcatgtcgatcgcgttgcaatgtttgcgttgatacaggcgctgtgccaatacctaaatgtttacacacataactttctatttcaggaggaatgttagcaaaagtacctactgcaccactcattttccctacttcaatttcttctcttacttgtttgaaacgttgtaagttacgttgcatttccgtgtaccacaatgccattttgacaccaaatgtagttggttctgcatgcactccatgtgtacgtcccatcatcaatgtatatttataattttttgctttttcagctaaaacgtcgataaatctttctaaatctttttcaataatgtcatttgcttgtttaataacgaaacttaaagctgtatctacaacatcagtagaagttaaaccataatgtacccacttacgttcttcacctagcgtttcagaaacttgtctagtaaaggctacaacatcatggcgcgtttcttgttcaatttcttgtgcacgttcgacatttacctttgcgttttgacgaattttttgtacgtcagctttcggtatatgtcctaattcactccatgcttcacatgctaaaatttccacttctaaccatgcttcatagcgattttgatcagtccaaatattagacatttcttctctagaatagcgttcaatcatttttttaactcctatcgtatgtatactcgaattttcaaaaacagaacatttttaataaaaataaacaaaaagttcgtttttaactctactcttcacagtttaacagaattggttataaatgtataaaaaatttccgtatattctcattctattttattttttacattaatacaattatctatggcagattaatactgatttctaattgtaaatgttcgcaatactttaatctaattggtatttataatgatccattaagaatatatttttgcattttagtttttctcccctcaactacactatccaactttttataacaattaggacaatcaatagctttagtaataccagaatttattcactttacttctcctattgtatggaattttcaacaatctacttttcctagtttcataatatttcttcttacatttcataatatgttttaaaattattcgcttctaatataacaaattttctactcacaaaaagaatatatattctattgcataggtgtggcattttaaatataagacattaatattgaactccagaatcgtataaatacgaaactgattatagaaaaatacgcagagatttttttaatagtaaatttttatagaaagacataaattgactacgcttctttcaaaatcgactaatatattttcatgaaactttcgatcatattaattattgaatgagatgtttgcaatttagtaaataagctactaaattattacataaactgataatgtgtaaaaattaattattttttaaacatagattaaaattttatattgaaactcttaactaaatttaatataattattttataataaaataaaggagtttttatatgaaaagaaactttccaaaattaatagctttaagtttaatattttctttaagtgttacccctattgcaaacgctgagagcaattcaaatatcaaagcaaaagataagaagcatgtgcaagttaatgtcgaggacaagagtgttcctactgacgtacgtaatttagcgcaaaaagactatctttcttatgttacttcacttgataaaatctataataaagagaaagcctcgtatacacttggtgaaccttttaaaatttataaattcaacaaaaagagtgatggtaattattattttccagttttgaacactgaaggtaatatcgattatatagttacaatttcaccaaaaatcactaagtattctagttcatcttctaaatacacaatcaatgtttctccatttttatctaaagtcttaaatcaatataaagatcaacaaattactattttgacaaactcaaaaggttactatgtggttactcaaaatcataaagctaaactagtactaaaaacaccacgtctagaagataaaaagttaaaaaagactgagagtatacctactggcaataatgtaacgcaactaaagcaaaaagcttctgtcactatgccaactagtcaatttaaaagtaataattatacttacaacgagcaatatataaataaacttgagaatttcaagataagagaaactcaaggtaacaatggttggtgtgcaggctatacgatgtctgcattactaaatgcgacttataatactaacaaatatcatgcagaagctgtgatgagatttttacacccaaacttacaaggacaacgattccaatttactggtttaacgccaagagagatgatttattttggacaaactcagggaagaagtccacaacttcttaatagaatgactacatataatgaagttgacaatcttactaaaaataataaaggaattgctgttttaggtagtagagtagaatcaagaaatggtatgcacgcagggcatgccatggcagttgttgggaacgctaaattagataatggacaagaggttataattatatggaatccatgggataatggttttatgactcaagatgctaaaaacaatgttattccagtatccaatggcgaccattatcgatggtattcatctatttatggttattaaaatttgtattttagaaaggtaaataatattatggaacaaattgaattatttagtattgataaattcaaatgtaattcagaggctaagtattatcttaatattattgagggagaatggcatcctcaagatttaaatgatagtcctttaaaatttattctcagtacctcagacgattctgattacatttgcaaatatataaatacagaacacaaacaactcacattatataataaaaataatagctcaattgttattgaaatatttataccaaatgataataaaatactactaacaattatgaacacagaagctttgggaacttctcctagaatgactttcattaagcataagtcataagactatctagatatgattaagtaaactattaatcttattaaaggtctctaggaagaaaaaatttcatgcgatgagattgttttagaaaaagcgacgatatatataatctaacaataatttttaaaatattaagaacccccagcatatgctttatatagcttgctgggggtttctcatacaatatggatcgagcatcttgcatgtataaacaaataggttattcaaagtaaaattactcaaactttgaatagcctttcctcttcaaatagtctttatttaaattggattatgttattggattttcttacctacaaaaacgatttcttgatgtgatacttcaaccgtgccatctttttgctcttgaaacacgggtttttcaatacgttttaccggcatatacccttgcattttcattcgtgacaaacaatcagcaattgtttcattctcatttactttgaatttcatgttctactacactttccagttcttctggttcataatctttaagctttctacgacgaatgcctttagtccagaatccaccatgtatgtttcgaggttcatacgcaatgataaatgctttcggatctaaattttttatcgtatccatcaatttacgttcatattttcttggtgttaaaatttgcatcaccatacgactaccatctctaccaaacgcagcatagtgcgtaacgccatatcctaaatttcgaagttcattcggtaaatctaactcatattctgctgaagttacatttacaactgtataacctaatgccagtttttcttctattttcataccaacaatgatacctattgaaaaaccaaatgcgtaggcaataatattttgaatatggtctaaattagacataaccaaacctaaaccaacgatataaactaatacttctaaaaaactaactgatgcagcaatataacgataacctttcaacgttaaaattgttcgcatcgttaaaaacgttacataacaaacgttaatgataaatatagttagtaccattaaccatggattttctgttacgaatgacataaggcgccccactctctttcaattacactttaaataccaaactgcttcaacctaaccttaatgaatgcatattaatataatatagtacgaaaactctcataaataaatagcgaatttgtcataaataaaaatttattctcaaatgaacatacttactttagttcatacactttcaatttatacactgaagtagtctagctgaatgtggtttaatgttattaattctaactcatatttaatttaagtcacacgttagaagaaaaaattaaattaggattttggccacgtgtatcttgtatatgcaagttcacgtttgtgtgcatttcgtatataatgattttcaattactttttgttcttctggcgtaactggcttaccttctaaataattatcaatcgcctcataagttacacctaatgcatcttcatctggaagctgtggtttatcatcttctaaatcagcagttggcgttttttcatataattcctttggcgcaccaagatacgctaataattgacgaccttgtcgtttattcaaaccaaatataggtgcgatatctgcagcaccatcaccgtacttcgtataaaacccagttatattttcagctgaatgatctgttcctactacaataccttgtcggtttgaagcaattgaaaattgtactttcatacgttcacgcgctttttcatttcctttttggaaatctgtaagaacaataccagcttcttttaatgattgcacactttgatcaactgcaggcttaatattgactgttactatttcatctggttcaatgaatcgcaaagcttggtcaacttcatcagcatctttttgaactccataaggtaatttaactgcaataaacgtacaatcaatgccttcttcacgtaattcgttaacagacatttgtactagttttccaactaatgtagaatcttgtcctcctgaaatacctaacactaaagattttataaatgaatgtgattgtacataattttttataaattgctttaattccataatttcttcagcactatcgatacgctttttcactttcatttcttgtacaataacgtcttgtaatttactcattatcttcttccatctccttaacgtgttccgcaacttcaaaaatacgtttatgtttattatcccaacatgccttgcttaaatcgactggatattcttgtggattaaggaaacgcttattttcatcccaaatagattgtaatccttgtgctaaatattcacgtgattcatcttctgttggcatttgatatactaatttaccattttcataaatattatgatgcaaatcaatggcttcgaaagattttataaatttcattttataagtatgcactggatggaataattttaaaggttgttcatcgtatggattttcattttccaaagtaatataatcgccttctgccttacctgttttcttgtttataatgcgatatacatttttcttacctggcgtcgtaaccttttcagcgttatttgataatttaatacgatcactatatgaaccctcttcattttcaatagctacaagtttatatactgcacctaatgctggttgatcgtatcctgtaatcagctttgtaccaacgccccaagaatctacttttgcaccttgtgctttcaaactcgtaatcgtttcttcatccaaatcattagacgcgataattttagtttcagtaaatcctgcttcatcaagcatacgtcttgcctctttagataaataagcgatatctccagaatccaatcgaatacctacaaagttaattttgtcacctaattcttttgcaacttttattgcatttggcacgccagattttaaagtatggaatgtatctactaggaacacacaatttttatgtctttcagcatattttttgaaggcaacatattcatctccataagtttggacaaatgcgtgtgcatgtgtaccagacacaggtataccaaataatttacctgccctaacattacttgtagaatcaaagcccccgatgtaagcagctctagcgccccacaatgctgcatcaatttcttgcgcacgacgtgtaccaaactccattaatttatcatttgatgcaatttgacgaattctactagcctttgttgtaattagtgtatggaaatttacaatgtttaataaaattgtttctattaattgcgcttgaatcaatggtgcttctacgcgtaacaatggttcgttaccaaagcataattcgccttcttgcatcgaacgaatgcttcctgtgaattttaaatcttttaaatatgataagaaatcatccttgtagccaatagactttaaatattccaaatcagattctgaaaatccaaaatgttctataaaatcaatgacgcgttttaaaccattaaaaacagcatagccactattaaatggcatttttctaaaatacaaatcaaatacagccattttttcatgaatattatcattccaataactttcagccatatttatttgatataagtcattatgtaacattaaactgtcgtcttctaattggtacacttgtatctctccaatcgacctaaatattttcttacattttatcataattcatttttttatatacataagagccccttaatttccatacttttaattaaaatcaaccaacaatttaatgacatatacataatttttaagagtattttaataatgtagactataatataaagcgaggtgttgttaatgttatttaaagaggctcaagctttcatagaaaacatgtataaagagtgtcattatgaaacgcaaattatcaataaacgtttacatgacattgaactagaaataaaagaaactgggacatatacacatacagaagaagaacttatttatggtgctaaaatggcttggcgtaattcaaatcgttgcattggtcgtttattttgggattcgttaaatgtcattgatgcaagagatgttactgacgaagcatcgttcttatcatcaattacttatcatattacacaggctacaaatgaaggtaaattaaagccgtatattactatatatgctccaaaggatggacctaaaattttcaacaatcaattaattcgctatgctggctatgacaattgtggtgatcctgctgaaaaagaagttacacgcttagcaaatcacttaggttggaaaggaaaaggtactaattttgacgtgttaccactgatttaccaattacctaatgagtcagttaaattttacgaatatcctacttcattaattaaagaagtacctattgaacataatcattatccaaaattaagaaaattgaacttaaaatggtatgcagtccctatcatttccaatatggacttaaaaatcggtggcattgtatatccaactgcaccctttaacggttggtatatggtaactgaaattggcgtacgtaactttattgatgattaccgttacaatttactagaaaaagttgcagatgcgtttgaatttgatacacttaaaaataattcatttaataaagatcgagcacttgttgaattgaactatgctgtgtatcattcctttaaaaaagaaggcgtatcaattgtcgatcatttgaccgctgcaaagcaattcgaactattcgaacgtaacgaagcacaacaaggtcgtcaagttaccggaaaatggtcttggctagcaccgccattatctccaacattgacgtcaaattatcatcacggatatgacaatacagtaaaagatccaaactttttctataaaaagaaagaatcaaatgctaaccagtgccctttccatcattaagttagtagaggtgtagcatatgcaattatattatttaggccctaaaggtacattttcatatttggcttgtcgtcagtatttttctgaaaatgaagcaacttttcaaccaaagtcaaatttatttgaagtcatcaaggcagttgcagatgatgacacatcgattggtgttgtccctattgaaaattctatagaaggaacaatcaacattgtggcagatgcacttgcacagcaagatgtctttgcacacggtgaaatacgtttagatattaactttgcattatatggtaatggaacagattccatttctgatattaaaaaagtgtattctattgcaccagcaatcagtcaaacaacaaattacatacatcaacatcaatttgactatgattatgtcgacagtacaattcaaagtttgactaaaattgaaaatggcgttgcagcaattgcacctttaggtagtggcgaagcttatggttttacacctattgatacacatattgaagactatccacataacgtgacacgttttttagttataaaaaatcagcagcaatttgatcaaaatgcgacatcattgatgtttttaattacaccaatgcatgataaacctgggctgttagcaagtgtgcttaatacatttgctttgtttaatattaatttatcctggattgagtctcgtcctttaaaaacacaattaggtatgtatcgatttttcgttcaggctgattctgcaattacaaccgatataaagaaagtcattgctattttagaaaccttagatttcaaagtagaaatgattggtgcttttaattaaactttattttctaggttctacaatttaaataaaataaagagtcaaccaaggattaaaataggaatccatccttggttgactttcttttgtttgtattgtttttacacgatgctgcggtatacgtttcattaccactcgttcaagcaattgctaatgtaaccttttatttttcgttctaatctgcaattactatttcaatggcagtggttgatttatatcaatacctaaaactataggcattacataatacacgactaaaataataattattgcactgattaagtttacccagaatcctactgatgccatttgtttgatagatattttacctgaaccaaagataattgcattcggtggtgtccctactggtaacatgtatgcacagttagccgccatagctgcaggtgccataagtagtaatggatgcactccaacagcaacagacaacgttgctaaaatcggtaaaatcatcgttgcagttgcagtattagatgtcacttcagttaaaaataagacaaagattgttatgacaattacaataagaatcggactaacaccatttaatgatttcaactgttcgcctaaccattttgctaaaccactttcagaaatacctttcgctaatgctaaaccgccaccaaataaaattaatacaccccaagggagctcttttgcaacttcccagtcaatgatacggcgatgtttttcagtatttttagctggaataataaataataatattgatataaaaatagcaatcgtaccatctgcaacagatgacgtaacttcccattttttcagaagaaactctcttgtaatccataataagctggcaagtacaaagatagtttgtactaccttttcttcatacttcattttgccaagctcgtctaacttttgtttaattaacgtctgaccaccaggtaaatatttcaaatcatgtctaaacgcaacatatcttaaatagagccaagtaatacctaacaaaacaatgaccgttggaatccctacaatcatccatttagcaaaactaatttcatgtccaaaatgttgcatgtattgtccttttaaaataattaatggcggggttccgattaatgtacccaagccaccaatcgtacctgcatagccaattgctaaaactagagatttttcaaacttttgaatacttgtttgattcgtattggcttcttgtaaatcatgtgcttccttaataattgctaaaccaatcggaatcataatcattacagctgcagtgttcgatacaaacatagataagaatcctgttgccaccatgaatccaagtaatatttttgaagtgcttgcaccaattaaattaataatagtcaaagctactctcgtatgtaaattccatctttccattgcaattgccaaaataaatccacctaaaaacaaaaagataatatcattgccatattcggatgatacttgttctggtgtaagtatgtgacctaatggtaataacacaattggtaataagctcgttgctgcaataggaattgcttcagtaatccaccaagtcgcaatccataaagtaatcgctaagacatatacgcctttccaaggtaagtcttgtggatgaaagaacaataatgttaataggaaaagtaatggacctaatattagtccaataagttgtcccgcactaaacggtttctttttctttgattttgaaaagaatgttaaataccttttcgatatcattgattgatgttgattgaaataagccataaatttccccctcatgatgattatgacaagctacttcaactcactatattagagtatagaaagttgtctatcttgtattatcattaccgtcaaaataccccttttatcagataattgggtttattatagcatatttataccgttttatgaatgcgctttcaaaaattatctactattcttaatcctaatgtcatgcgaaactttttacttttttatttcatctatattgattgtagtaacttgaatacccgcttcaacaggacttaaaaacactgtatcaatatcttctaaatgaattgattgagtcgaattattgaatgtattcccaacgattaatacatctttatgtttaacattattataattacgtacatgtatcgcatctttagacattgatcctttaaattcatttccaattatattcatatttatgcctgcttgggaacctaagtcttttcctgtcatcacatctgctgcatttttaccatctctaactcctaaatatctaataccaccctcacagttaataaacttattattaataatgaaagcatctttatacttcaagggagttaatgcataaccttgtatatcttcaaatatattatttctaatatgaatattctcatagtaacgattatgtctacttgcatgtgagccaatagcacgattccaacttcccatttcgggcaattctgaaggtccaaaataacaatcttcgataacgacatttttcgttatcgtaccatctgtcgttccgaattttggaaaagcaccaggtacttgaatgtctaattgtattgcttcagaataaaagcgttcgccactatagtctatgaatccttcaaatgaacagcttttaatatagagtccgttaatcccacaagcatcaattgcatgaccactcactacattcttaatggtcacacctattaattgaatatcttcagcatgcccaatgcacatagctgtattgttataaggatacgatacaccattcatatcaaacttgccgcctttaatatgaatatgactgtgtccattataaccacgataaaaaccaaagcgatgaccattttttaataaaggaccagaatgacatcggcgtaaaatagtttcattatctaacaaaagtgttgtattgccatatatcgttaatggtttgcaaatatcatacgtccctttcggtatataaactgtcgttggtttacatcttccacgatttaacgcacgttgtattgctcgagtatctttagttttgtttatgcctgttaacccataatctttcatattgatatacataaatcgtcatcctttgtctattttctaattactcatatattaaccaattattcaaattataatcgtgttaggttgatttagcagatagtcataaatctcgtgatgccatctattagcatttttatattcaaaacatcaacacttgatattagttctaagtttgtcacatttagtattctattacagctattttaaaactatcgcaaaaacttcttatattatttgttgattgcgtgatttgctcttccaaaaaagttgattaatctatatacttaatctatatttatatattaaccattagggttaaaaattactctagcatttatgaatagatgggagtttattttattatataggagagatgttgaatgacacatcgcgcactattagttgttgactattcatatgactttatcgcagatgacggcttactaacatgcggtaaacctggacaaaatattgaagattttattgtttctcgtatcaatgactttaattattatcaagaccatatattctttttaatggatttacattatttacatgacattcatcatcctgaaagtaaattattcccaccacacaatatcgtagatacaagtggtagagaattatacggtaaagtaggtaaattatacgaaacaattaaagcgcaacctaatgtacatttcattgataaaacgcgctatgattcgttctttggtaccccgcttgatagtttattgagagaaagaagtattaatcaagtcgaaatcgttggtgtatgtaccgatatttgcgtgttacatacagcaatttctgcatacaacttaggttataaaatttcagtacctgctgagggagtggcttcatttaatcaaaaagggcatgaatgggcacttgcacatttcaaaaactcattaggtgcagaggtagaacaacacgtttaaatcgtgctaaaataattataaagaatacaatttacaagggagatatttgacaatggctaaaacatatattttcggacataagaatccagacactgatgcaatttcatctgcgattattatggcagaatttgaacaacttagaggtaattcaggagccaaagcataccgtttaggtgatgtgagtgcagaaactcaattcgcgttagatacatttaatgtacctgctccggaattattaacggatgatttagatggtcaagatgttatcttagttgatcataacgaattccaacaaagttctgatacgattgcctctgctacaattaagcatgtaattgatcatcacagaattgcaaatttcgaaactgctggccctttatgttatcgtgctgaaccagttggttgtacagctacaattttatacaaaatgtttagagaacgtggctttgaaattaaacctgaaattgccggtttaatgttatcagcaattatctcagatagcttacttttcaaatcaccaacatgtacacaacaagacgttaaagcagctgaagaattaaaagatattgctaaagttgatattcaaaagtacggcttagatatgttaaaagcaggtgcttcaacaactgataaatcagttgaattcttattaaacatggatgctaaatcatttactatgggtgactatgtgactcgtattgcacaagttaatgctgttgaccttgacgaagtgttaaatcgtaaagaagatttagaaaaagaaatgttagctgtaagtgcacaagaaaaatatgacttatttgtacttgttgttactgacatcattaatagtgattctaaaattttagttgtaggtgctgaaaaagataaagtcggcgaagcattcaatgttcaattagaagatgacatggccttcttatctggtgttgtttctcgaaaaaaacaaatcgtacctcaaatcactgaagcattaacaaaataatactatattactgtctaatcatagacatgttgtatttaactaacagttcattaaagtagaatttatttcactttcaatgaactgttttttatttacgtttgactaatttacaaccttttcaatagtagttttcattcctttagctatcctaacccacagattagtgatttctatacaattcctcttttgtctttacattttcttaaaatatttgcgatgttgagtataaatttttgttttcttcctacctttttcgttatgattaaagttataaatattattatgtacacgattcatcgctctattttcaactttcaacatatataattcgaaagaccatttaaaattaacggccacaacaatcaaatcaattaatcactttttccaaaataatcatataaggaggttcttttcattatgaatatcattgagcaaaaattttatgacagtaaagcttttttcaatacacaacaaactaaagatattagttttagaaaagatcaattaaagaagttaagcaaagctattaaatcatacgagagcgatattttagaagcactatatacagatttaggaaaaaataaagtcgaagcttatgctactgaaattggcataactttgaaaagtatcaaaaatgcccgtaaggaacttaaaaactggactaaaacaaaaaatgtagacacacctttatatttatttccaacaaaaagctatatcaaaaaagaaccttatggaacagttttgatcattgcaccatttaactatccttttcaactagtattcgaacctttaatcggtgctattgcagcaggtaatacagcaattattaaaccatctgagttgacaccaaatgttgcacgagtgattaaacgattaatcaatgaaacatttgatgcaaattacattgaagttattgagggaggaattgaagaaacgcaaacgttaattcacttaccttttgactatgtcttctttacaggaagtgaaaatgtaggcaaaatcgtttatcaagctgccagcgaaaatttagttcctgtgacattagaaatgggtggtaaatctccagtcatcgttgatgaaacagcgaatattaaagttgctagtgagcgcatttgttttgggaaattcactaatgccggccaaacatgtgttgcaccagattacattttagtacacgaatctgtaaaagatgatttaatcacagccctatcaaaaacgttgcgtgaattttatggtcaaaatatacaacaaagtccagattatggccgcattgtaaaccttaaacattatcatcgtctgacttcattacttaacagtgcacaaatgaatattgtatttggtggtcatagtgatgaggatgaacgttatatagaaccaacattgttagatcacgttacaagtgattcagcaattatgcaagaagaaatttttggtcctatcttaccgattttaacgtatcagtcattggatgaagcaatagcctttattcaccaaagaccaaaacctttgagtttatatttatttagcgaagatgaaaatgctacacaacgtgtaataaacgagttatcatttggcggcggcgctattaatgatacattgatgcacctagcgaatcctaaattaccatttggtggtgttggcgcctcaggtatgggacgctatcatggtaaatattcattcgacacttttacacatgtaaaaagctacattttcaaatctacacgattagaatcaggtgtccatttaccaccatataaaggtaaatttaaatacatcaaagctttctttaaaaattaatttttgagacaaaaataaaccatgcttccataatttgatgttcttgaaaacaataaatttcaaggtatacacaaattttttgtaaacatggttttctttttatcatgattaattaaagattaaaatatgacacatacaccttcagatgctacacgagtattatcacatagagtaattttacctgtttctttacttctttcaaaaacagttacaactgaatctccttgctcatgagcacaaactaaaaggtcatctgatgaggcaatattaaaatctcttgggaattgaccaccactttcagtaattgttactagttctaagtgttgaccattatcaagaactttaaaaattgcaatgctatcatgccctctattagatacatataagaattgttgatcatgagacaaacgcactgctgcaagtttagtatctccatcaaagttttcaggaattgttaaatgacgctcgagctcttcaaatttaccgtcattatattctgcaacactcacagtatttgataattcgtgtacgacataagcaaattttccattatcatgaaattcaatatgtcttgtcccatcactatctttaaataaagattctttataaaattcaaacccgttgtcatcaaatttataagtaacgatacgatcagcacctaaatctgttactgcaacgtacttaccatctggagtttgattaatataatgtgcgtgtggatgatcttgtctttcatgtgtacctgttggaaaatcatgtgcaagttcttgaattagacgtataatttcacctgtgtgcgtatttaattcatacatacgtatgatgccagcaccatataccgcttcaaataaatatcgtttatcttctgaaatcgatacataacaacctgtaccagcttttgaagacaaacatttatttaataaatgcaattcaccattgtcatcaattttcaaactcgcaacaccgcattgttctccttctttgttgattccatataaaacttcgttattacgcaccaaatatgtagacgcttctaattcaaatcctatttctaataaatcaatacgtgactgattttcgtttaattcaaaacgataaatccctttaccattctttttagtgtaagaaccaatatatccatttgtcattacttttacccctccatgtcagtcttattttcattttattaaattttagctagaattaacaatcatttatcatttccttaacgctaaaactgtttaactactttaaaagaactatttgctgtgatatgtcattattcgattttaattaatccctcttttttacttacacgagcattaattattaacgcgtttatgcttccacaaaatttttgttgcaaaacagaacacatgttcgtataatgtaattatcagattggggtgaattaaggatgacaagttatgaagaagaaactgattatcgtaacgttccaagagaattactagataacaatatacctatgggaagaggcatgattaaatgggctccttttgcaacattacccgaacaattcgaaacgattcaacaatacattatcgaccaaaacaaaattacacgtcctgtattatcagatgatcaattggctgagctaaacattcggctacacgaggcgctacaatatgcccaacctgtagaagttaaattttataataatggctttgtagattcagtacgcttaaccatttatcgtattgatgctattaattatgaaattgatggttatgtttacaatcagcaacaacgtcaaaaaatttctatctttgatatcttagatattgtcttgttaccttaatgctttgaacataattaaacagattgagtatatgcatataagatgatttttaacatcatttttggatgataggatgttgcgccacgatgatgtctgaattcatcgaattcgctatcaggtattgtttcaacaatttcattaacatatcgtgaaatatcattttgagggattctaacagaagtttctattggtagtgtagttgggtcatgttataatttttatacataaggcacctcgttaatttagtttagtggtatttattaaattataagaagggacccaacacagaaaattcattttattgaattttacatttatgtgcaagttgggcaaagtgtcttattttttaaaagtatttcaaagtaaaattacatgttaatacgtagtattaatggcgagactcctgagggagcagtgccagtcgaagaccaaggctgagacggcaccctaggaaagcgaagccattcaatacgaagtattgtataaatagagaacagcagtaagatattttctaattgaaaattatcttactgctgttttttagggatttatgtcccagcctctaaatgttattagttatttttactttcaatatcagaaataatttctttagtttttctttcaatatcttcaaaatcttttttaaagatataagcaaatgctactacaccaacaccagcaactaatgttgtaatagcaactaagctaaatacgaatttaaacacacatttaataaaattccacatctcaatttcacctctgttaaattaaatacctatctacatttcattatactatcatatatagaataatcattaaataaatacccacttttacgaaatatattcatcaaattatatagtgagcaagctaatgattattttcaaaaatgccgaggaacctctgtttcaacgtgacatgaccttatatgctaatgttaacaatgactattatcgtgaatgctaacttaagattgttatttatgataagatgattttaagtttttaacttaatatccccaccatctataaaaatatgttttaactgattgataagtcttatacaccgagaaatcacctcaaacaattttatatttcatttagtaaaatataactttatttaacatgacattcaatatacatacgattactatttatttacaatatattacaactaaaaagaaaggggccgatgatatgcaacaagtgatatcagatattatgacttttagaggttcacatttcgagttaggtgttaaaactggtaaatggcttcaacaaacacctcttctaaaaaatcgagaaaaagaatggaaaaaacgtgtcccacgtttcgatatagatgtaaatgaaacttatcaaatattccaaacttacgcacctcaaatatgggaagaattaatgggactacaaagtatactcaaaatgccaacacgccaaattattttaaactttggacattatcgttttaccgatttaaaagaaagtggttgcacggtctttcaaggcaaagacttcatggttagaaattatgattaccaccctgcaacttatgatggtcgctacttactatatcaacctacagatagcggtttagctcaaattggtcctgtatcaagggtaactggaagaatggatggtatgaatgagtcaggattaactatgggctataactttatgcaccggaagaaaccagcaaatggttttgtatgttatatgattggtcgtctaattcttgaaaattgccgaaatgtaacagaagcaatacaattattgaaagaaataccacacagaagctcatttagctacatactgatggacaaatcattgaaccatgcaattgttgaagtgacaccgagatcaatagatgttcgttatgataatatatgtacaaatcattttgaaatattaacacatgaaaatcgtaattatacaaaagaatctaaagaaagactggcgcgtaccatttcacaaactaatgataatttagatatgactacagcatttaagttattcaataatcctcagtatgaaatttacagtaaactattcaaaagctggtctggcaccatccatacatcaatgtatcaacctgaaacattaactgcatattttacattgggagaaaatgcgccaccagaaataatagatttcaaatcatggttagatggtcaagaccttaatatcactcactttactggcaatatagataccgacttaacttttgccaacaaataaataacaccgatattagagaaattatgcttcctaatatcggtgcttacatcctttatttattcaactttgatattaccatcaatcgtataaaattctaaaacattgtcgcttttcccaactttaccattagtaaatgttttatttttaactacgctatcacccgttcccggatttagctttagtatagtgtcttcaggtttactatcatacttaaaacgaatatctccttgtttagtagaagcttttgcatctacttttgatggcatgtttttaaattcaatgtcaccatgatcgtttaaaaatatggattgtttaatttgactcttgtcgatttgtagcgtaccaataacaactttaatattgctatttttaatgttacttttactaatataagtagaactattatttgtctttgaatctagtgcgtcaagatttgagtttttaataactacttcaccgttaatgctttgaatacttgtgttctctaaatcaacatcactgattctaacacttcctgctccagatgatagatttaaacgtttaatcattttatcaggcatttcaatcgttaacgttttcttattctcatgaaaaggattcatatcaattgcatatcctcttgtcttagaccttttatcactaatcttcaacgtcttatctactatattaattaatatatcattgtcaccatcatatttaactctaaattgattcccccgttttatacgaagttctgtactatccaaatttatagatacattgtcaaaagcatcgtctttgaatgttttatcatattgtttagtaccatatttgtttttatcatagctgaaccaaataatggttgctgctgtaaaaaagacaacaaacactaaaagcccaataaaaaagaatttcttcattttctaacgcttcctttgacagttttaatataccaaagtaaatattttaagattaaacgataaatgtattctaaaatcttaaatatgacaatgataaatactaatcctaatcctgaatatgatatggcaaaaaatacattactaattgagtctacaattcctctggatattgctgatgctaataaaataattggacaaaacagcagcaaaagtgatattaaaaataatgctaatacaaataatccaactatagatactggtataaggatgacaaaaatagatagaatgcctaaacttaatgaagcagcaacagctcttgaaatattttcaaatgttggtttagattcagcataatcaataacacttctagcttttgtttcagctgcaacatcttgtgggtcttttaacttctttaaaatttccccttcatcaacgccattaagttcttgctcataaaaataacgttcatattcatacattttttgatctcttaaatgcctaggtagcgcatcaagtgctgtttctaattcatttaaataagtaatcttgttcatataggtcactcatcccaataaaattatttattcgttttttataactttaaggcctaaagctatttactaaaaaattcaatacgtttaatttctaaatcttgataaagtaagtttaattttaaatggttatctctatcaatatactttaccgatgagaaatcattgccaacttttgttcttttatatccgaatccaagattttcaatcgcgttatttatcggcgaaccaattcccccatcaaaattagtatgtatcttttcatctcttactaatattatccccttaacgatgttatccttttctctcactttaacggtaagatcagggtgagctttactgttataaaatttaaaacgatcaaacttaatttttttatttacttcatagccttttttatcaaacttctcatttaatttaatatcgtttatttcaagattagacaaatccacagttttcgtatgacgatattgatataaaccaattaatacaccaaaagaacagattaaaaataatataaacacaacccagcgattttgaatacgcactgatgtcaccctttctttgtacttatttaaatatagcataaggtgcctcccgtttcatccttaacaaaaattaacaaagaatttgcaattaatttatttcattaccttttattactataaattggtataatgttgtaaatgctaaaggaggtttttacaatgacaaatttagaaacttatttcaaaaatagccaacccttaaatgaatacattgatggaatgaagacaaatcaagataccgttctcagtatctatcaatcatttgagttaccagaagatgattcacgcatcaaaaaaataaaagagatgaattattctaaagtattagtaattactgaagactggtgtggagatgcaatgatgaatctcccaattctaaaacacatcagtgaagcattaaatttagaagtacgcgtgttccatagagatgatgatacaaaactgatcgatcaatatttaacaaatggtaaatcacgtgcaattcctatcttcgtattcttgaatgatcaattcgaacaagaaacagtttggggaccaagagcaaatgaagtccaaaaatttgtaactgatgttcgtgctgataaattaccgagcaaagatcatccagactatgcagatttagaaaaagaaacacacttagttatatcaaaccgctataaaactgacgcttcattttggaaagcagtttataattccatcctaaataaattagaaaataaataaatttacaataagacaaactttgaggttgggaaaatttaaaattcccaacctcaaaattatttttattaaatgtcttttttagcgacatataagatattcaaaatgaagaatatcactatagaacctaatgaaattacccattgccaattgctaaaatcaaagttagagctaatcattttatcagttaagtaagcaaaagggatataatcaaaagcatctaaaactttttcaccgtatcttgggataaatgtaataaaaggtttaataaacggtacaatgagtactaaaaatacacctaatgaaaatatcattgctgttttttgtgatgcaagtgtgattaagaataaaaacaagccaaagaatagtaaaaagattaggaagaaccataaattatctacatatttagaaaacgccaaattttttccattactagatgcctgcacaacaatcaaaatcacataatgaattaatgcaaataatattgaaattaaaataattgaaattgttttcgaaataatgtatccaacgcgtgttttaactttactcatatatagttgaattgtaccttgtgaaaaatcacgcgtaattgtcttaacaacaaacattaatccaattattaacaataaccattttgctgcagcaaatacagatccatagacaataatatgtttcgggttatccatcgaatttgccataagtatactttgagttgcaatcaaactagatacgactagtatcgctaaatatgttaaaggacttttaaatatactataaaaatcatacttaactaaatttaaaattctcattatttatcacctctttgatttatattgaagtacgtatcacgcaatgaacttttacgtgtttcaatatatttcggataaatatctaattcagataatgcttttagtataacttgataatttttttgtgcattgatcattaaatgtccgtctgctttgtcgacattttgtaattggaaatgctctgcaagatatttttcagttctatcaaagtctttatgatcaacagtaactatcgttgtgtcagatgcaacacctacctccatgtttacatcttgaacaaaatgtccgtctcttaaaaatacagctctatcacaaattaattcaatatcttctaacttatgacttgatattagaattctcatatcaagttcatttactaaagacttaattgtagtcagcacatcaattgagccatctggatccataccatttgtaggctcatccaagattaaaaatttaggtttattcattaaagatactgcaattgctaacttttgcttcatccccattgaatatttcttaactttctttttaatataaggtctcataccaaatgcatctataattttgtctgtgtatgctttatcaaaacccttacctaatacttgtgcaaataatttcaagttatacaatcctgatttattatcatataatttaggatgctcaattaaaaaaccgatattatctgcattatcaatatctacttttccatcaaatttaataatattaccattcattactttcataatggttgttttaccaacaccgttttttcctattaatccgacaattctactatcgccaaagtcaaaatcaatatcatttaaaacgacatttgagccgtatttttttgtaatatgttctaatttcatcgactgcctcctttaaattttctagtatttattttattgagctgtttaaaataattaacaataagtataacaatgctgataattagaaaaccaatatttaaaatatatgaatataaatctgggaatgatgattgacttagaacaaaataattcaccaacactattgcaattgaaaataaaaatggaactaaaatgataatagtaaacacgtatataccatatggcactttgactctacgcaattctgtaaattgactaaatgcaattggtatagacaagaagttagatatgacaaatgcatatgcagttgaaaaatagattgaatttggttcaatcacatctgcttcataagcatataaactaataacaagcgttccaattaatgttaaaacaatgcatgtaatatagttggcattaagcaattgtttttttgacactggtaaactcatataaaaataatatgaatcattaccacctaatctacgattgagtctaaataagtgaccagcatctaaaatccaaataatcaatattgttggacttataaaagattgcaataggtaaaagaactttgttgagtcaagcattatataaaaaggatataaggttaataatagaacatagatgataagtgtatatcgtcgtaatttaaaattcctaattaacaatgccttcatttaaaaaccttcttccatcaatttgatgttttcatgatatttaggttttctcttttcaagataaaccattaagttctcaatagaaggtgtagtgatattcactttatgacctaaaatttctttaaatacttgcgcatgttctgttaatcctataaatcccgtacgcttatgttcttcataaataagtagagatgctaattcatcatcaaggtcctcagttgcaccactcacaacttgatatctttgtaacagttgttcttttgaaccatttaagataacttcaccgtcacttaagtgaatgatataatcagctattttttctaaatctgagataatgtgtgtcgacatgaatattgttttattttcatcaattaattcttgctgaattatctccaatagctcatttctagctaagggatcaagacctgaagtaggctcatcaaaaatatacaattcagcatgatgtgaaaatgcaactgctagtgataatttcattttcatcccagtcgaaaatgtttttattgatttattgattggtaaatcgaacttttcaagataaaattcaaatacttgatggtcccatttacgataaaaaggggcaatcattttttcaagttgcttcgtagtccatctctcattaaaataattttcagagtaaacaaacccaatactattctttaactctatcggattgagagccatatcctcttctaatactctaataacaccagtttgtggttgatacaaatccataattaaccttattattgtggttttaccagcgccatttctaccaataaaaccagtgacgaatccttgaggaactttgaaagagatattctttaaattaaactgatcacttgaataattaacattacttaattctatggcattcatgatgattcctcctcataaatgaacgttaaaatatcttgaagttcctcaagtgacatttcgatggcttgcgcttcattaaccaattctttaaccaaattttcaatggtaaaaaattgtttctcttttaaaatagaactatcttgctccttaacaaaggtcccttttcctctaattgttgtaacaaaaccgtctttctctaaatcttcataagcacgtttggtagtaatcaaacttacttgaagatctttggcaagttctctcattgacggcaaatgctctccaggagcaacatgtccctttaaaatattttgttttacttgttgcttaatctgttcataaatcggaaaatcactattgttttttaaaattattttcatcaacgtccccctatcaacttctgtatatatacaatatacacaatatacacagttttgtaaatatgcatgtccattatcaaccagtcttcagaaataacactgagtattgtattactagcagttgaataaaatgaaatgacactaccatttaatcttgcattgtctacttcaataaaaaagactgctaaaacgaatgtctttaatctctacgtgacaaccgtagcgtcaacataaacaatcgttttaaacagtcaattctatttactatttttacgtcgatcattacttctacttataaaagcacaaatcataaacataatcgctgctaataataattttataccttggctttcatgattagttgcttgtaaataataaccaataataaataaaataattgcaagtactacaaatatttttgttagatgtttcaatttatttcacctcaacatcgacattataacaaatataaatttttttaataagttattgaatttcaaaagttcaaggtactaatcactttcaactaaaatagcgcaacaaaaccattcaatcaaaatgattattgattgcgatatattgtgttcaatgatattatttaagtgtatccacagaattatactacacaaccccaagtctggtaccagcagacttggggttatttatgtgtgtaggatcattttttatttttccatttcagttctaaccaaagtcgaaaaataattagtaagccacctgtaataagtgtcatcatcccttcttgccaccacatcattacactacacctccgttcgactaaagtatcatactgaaggatgacctacacctattctaacataaaaacagaacatatgttcgtattttggcagcagattttacatattattcgttaattcaccaacaacactttatctttggtataattaaagataatatataggcatacaatttttttaaagagaggttaagcaataatgaatcctttagcccaaagcttaaatgaacaacttcaacagtcaaatgcaactgcctttacaatgttatctgacttaggtcaaaatatgttttatccaaaaggcattttatctcaatctgctgaagcaaagagtacaacatataatgcaactataggtatggcgacaaacaaagacggaaaaatgtttgcatcatctttagatgcaatgtttaatgatttaactccagatgaaatattcccttatgcgccaccacaaggcatcgaagaattacgtgatttatggcaacaaaaaatgttgcgtgacaatccagagctatcaatcgacaacatgtcactaccaattgttacgaatgcattaacacatggtttatctttagttggcgatttatttgtaaatcaaggtgacactatcttgttaccagagcataattggggtaattacaaacttgttttcaatacgagaaatggtgcaaaccttcaaacatatcctatctttgataaagacgggcattatactactgattcacttgtagaagctttacaatcatacaataaagataaagtcattatgattttaaattatcctaataatccgacaggttacacacctacgcataaagaagtgactaccatcgtcgatgcaattaaagcattagctgataaaggtacaaaagttatagctgttgtggatgacgcatactatggtttattctatgaagatgtgtatactcaatcattatttactgcattatctaatttaaattcaaatgcaatattacctgttcgtttagatggtgcaacaaaagaatttttcgcatggggattccgtgttgggtttatgacatttggaacgtctgatcaaacaactaaagaagtattagaagccaaagtaaaaggtcttatacgaagtaacatttctagtggacctcttccaacacaaagcgctgttaagcatgtattaaaaaataataaacaattcgataaagaaatcgaacaaaatattcaaacattaaaagaacgctatgaagtcactaaggaagttgtctatgctgatcaatatcattcacattggcaagcctatgactttaactctggatactttatggcaataaaagttcatgatgttgaccctgaagaacttcgtaaacatttaattgaaaaatattcaattggtgttattgcacttaatgcaacagatattcgtattgcgtttagctgtgtagaaaaagaagatatcccacatgtatttgattcaattgctaaagcgattgatgacttaagataattaatttcaaccaataatctgatgagtatgactcggattattggttttttatttttaaaattattccttctttcaaagtatcataagatatattttattcagcaacttgtcaaacactatacctaattagttttatacatctctcctaacaaaatttaatttatttggtacaaatttatataacttttggcaaatcacttcaaacattcaagcatcacatctctacaaatgtaaaaggcaccccacgattgtgagatgccttattataaaattaaagattagaatttaagttcaatatctacctttttaatgtcagttgctttaaatactctttcatctttatactcagtttttaagtctacatattttgacgaaccatttttaaaatacactttatacactgcgcgttcagcaagtcctatgtcatgtttagttatcccttgatcatttgccattgctgatttaagttttatacttaaatcattaattgtaattttgcttgcattatagaacacaaattcatttgaaactatgttttcaaatttatttattgttactgggaatttcacattattagatttatttattttttttttgatttagtgtattgttttacatcaatatcaatctttttaatatctttggcactaaataaattaggtgtaaagatgtctgattttaaattcactacttgtttctttccatttttgaaatatactgtatattttgcttgtttcgcaaattttaagtcaagatcactgatacctctttcactttttaatacagatttcactttgtcgtttaaatatttgtaactaattaattgtttattcgaaatttttagttttgataaaattggtgttgatgtgccatttactgcaattgtgtatggtacatatctgtctgctttcgctttagttcctgttttaacagtaatttcaattctcttaacatctttcgcatgaactaagtttgctgtgtaattttttgaatttaactgtaagattcttttaccaccatttttaaaataaacagtataataagctttcttagcatattttaaatcttgttcactaatacctctatcatgcttcagtactgattttatttgactagttaaatttttgtaatttgtccaaggtttatttgaaaatgaaagattcgataaaatgtttgtagatgtaccatttagattaattgaatatggaacttgatagtttcttttagctttattttcgatatgtttttttgtatctacgttaatattgatacttttaatatcacttgaattgattaaattcgctgtgtaaatacctgatttcaaatcgataactttcttcgttccatttttaaaattaactgtatatttcgcttgcttcgaaagtcttaaatcaacatcagtaatacctctatttgattctaaaactgatttaactttaccctctaaatctttgtaactaatattttgatttttattaaatgttaggtttgataaaatgttttggcttgtgccgttcactgtgattgtatatggcacttgaacatttgctttagctttatctttaggttgctttttagtatctacgttaacactgatagctttaatgtcacttgtattgattaagtcagctgtgtagatacctgatttcaaatcgataactctttttgttccatttttaaaatgaaccgtatattccgcttgctttgaaagtcttaaatcgatatcactaatacctctattaaagtataaaactgatttaactttattctctatatctttataactaatattttgattcttattaaatgttaagcttgataaaatgttttggcttgtaccgttcacagtaattgtatatggaatctggatgttagaatgtccatggtgtaatgtacttgatgatttatctaatggcttagctgcggcagatgcttcgttagtattaaagtttgctcctgttgatgctataacgcctaatgctaatgttgttgtaatcaatgacttaaatttcataaattatctctccttttttatgtaattcgtgattgcaactttattatagccagactttctctattttttgaattaactgaatattaataataaattatctttaacaataattttttaacactgttaaaagttcttttaattttgattaactaactaatttacaatacctaaaatgttgtttgattttgtttataccaagtttcaaacttaaatgtcataacaatcttcatttcttaattccgattatatttgtcgattatatttacagcatctttatactcaaaaaacatttacttaaaaatataaattcgatttaataattaatttaaatttagttaatcaattttgcatctattttgttgtaagctatataaaaggagtgataatgatggtaaaaaaaacaaaatccaattcactaaaaaaagttgcaacacttgcattagcaaatttattattagttggtgcacttactgacaatagtgccaaagccgaatctaagaaagatgatactgatttgaagttagttagtcataacgtttatatgttatcgaccgttttgtatccaaactggagacttttaacataaaattacttatcattcaaaaagtaaaacagcataatatcaaggtttataactttatcattatcaataatacctcatataaaataaaattttagggactttttagggactttaaatttaaaattacaagtttaatagaaacatcaaaataatcacatgtttgtgtggaatgtacaccccaaaagctagactgaaaaatctattttttgaggtgtatttttataggtaaatataataaattagagtagacaactcagaattccaattttataataatattgcttgacatatcaaactagatagtactattttgaatatattattataatcaaaaattcattgtaaacttttagacaaaaggaagtaataaaaacgtgaaatttaaaacaactaaagaatgtaaaagtaataatatctttaaaagaagtcaagaaattaataatagagaaagtgaaaagggttgtttatggggcattagcatgttgattctacttttcttattgattctgtttggaataactgcttgttcatcaagcattcactttattaattagatttttttacttggaggtatcatgtgaagaaccatacaaatataattaatatcttattagttatagtcaactcattaactcattttctaactctaaacacctcattttttaatagttcagcatcggatttctgttttatcataggggctatatttttcttgatcggaatttttgttgcaatatacggtatgaagcgagcaacatattggttaaacttattgattttatttaccaatattttttattttctacacttctgtgttttacttttgttaaaatatataggatttaaattatttatttatttatgaagggtgtgtattgttatttacctaatttatagtctaattgtctatttcatctgcattataaattttttcataatggctgcaccattcttaatgactaatgctgattatgtatggacgcctatgactacagttacgttatttattttgagtttgattattttcttgatatttataaaaacaaaagatgtcgttcatttaacaattttcatattaaacttacttttttcaatactttattgtttgcctatactgttttatttatgaacacttttatattatctagaaaattaaaaccacccgtaaaagggtggtttttttaatatttactttttagtgcttcgtcaatttcgttataaatcttttgaagttgatattttgcttctgacattttcttaaagtcttttgacttaagagcatacattgcttttagacctgaaatttttatagttcgcttataataagtgtttaaacttccagtagctaattcattaacatttagttcatctaataacgattttaattcattagctaacttttcgttttgatattcattcgatgttggcaagcttgtgctagcttgtgcctcatttttatctagattagttactagtggtgatgctaaaacgattgctaaagttcccgcaagtatagattttctaattttcattttttattctccttagtaattagtactaatttattttaatgactaactaaaaaaaagtacattaattattcattaactatatagatcttcttattaaatgaaaattaataaattatcaaattgacataccttattgtatttatagaaaaacaaaaaaaggtaagcaccgaaatgcttacctacttcccataaacaatataacacatatacattgatttggaaagcgcaaaaataaatttaataaactagcccgaaaaggagcaatacataaaaaatgaaaggcgctccttgaaaacgcccaaggtaatattaacataaaatggctactattgcattatctaattttatttaattaaaacaaatatatagcacaaaaaaactagcccgaaggctagcttatgaatagatgaaaatttgaacacattgctgtgtctaagataaatataacacatattaattactattaatagaaaaattatagcgttttttagatcatttcaatttatcaagaccaaattcatcaaaacactaattgaactttaatttttagttaaaaataattaatcttttattaatttcaagttaattaatatatttcgtcgattagattaaactcattttaggaatttcgcaaaactaactataaatttaaatatagaatttaaggagaattaacatcattatgaaaaagaaattagcaacaacagttttagcattaagttttttaacggcaggaatcagtacacaccatcattcagcgaaagcttttacttttgaaccgtttcctacaaatgaagaaatagaatcaaataagaaaatgttagagaaagaaaaagcttataaagaatcatttaaaaatagtggtcttcctacaacgctaggaaaattagatgaacgtttgagaaattatttagagaaaggcacaaaaaatactgctcaatttgaaaaaatggttattttaactgaaaataaaggttactatacagtatatctgaatacaccacttgctgaagatagaaaaaatgttgagttactaggtaaaatgtataaaacatacttctttaaaaaaggagagtctaaatcatcttatgtaattaatggtcctggtaaaactaatgaatatgcatactaatagtagttacataaattaaaaggtagatatttcttttttatataaaggtttggcagacatttcataacttgccaaacctttatatatctaattatcaaactgcactaaacttaccaaaaccgcttattctattacctgccttgtctacctctcctgtcgctatataacgacgttgtccactattagcaatataagtaatccatctatagccattaatgcaatatgcgccgtcatatttgatcgttgcgttattgggtaatacacctgtaattcttgaattagttgaatagccatccctcacgttattacctttaacattggcaactgtgtaataaccagtctcttttttatacggtcattgtttttatcgagtgtataacctgctggcactggtgaattcttttcatttttagctggtgttttaacattactgatacctgatacacacttccaataaaaataaccacaccatttaagatgcggtgtagcgactgtaatatttctatgttgttgagatatatttatcgagtgaagggcaaaaagggtatcaattgccaggataagtgttaggttactaggccacttaacaggctatatagttcactcctactatatacaattaattataacataaaaagcaccccgtaaactattatacgggaatgctaaagtcatatatactacgggggagtagtatgaaaactatgctctctatcataagaaaaaacacccagtgacatgcttgggtgaacaaggatgtaaatagttgatgcatgtgtaacacatcataacaaaaaattaaccggaaggctagctataacatacaatctaaaaagacgtcctttgaatacgtctagaaagattataacataaaaaaataggcaagtaccgaagtacctgcctaaaaaaggattatccactttttcatcctaactgatttctccccataagtcacctaatatctgattaggtggggaagaaccattcgtgcatgaatgagaatttgatgaaagataattttcactacacatattcaatcaagacattgctttctataataaacaactattttgttttatttcttttctataacaacctttgtaattaagttgaatccagggtttttaatatgctctgataaatctgggacaacaaaacctttttctgttatagggaaagacttcgtttcttcttttttcttattcttatcataataagtgacttcgatctttgcgcttggatctaattcaactactctaaactctttatatgctgtcgcatctaatgcccattcgacatagtattcaattttttcttttgtaagtgtagtcccaggtttaataggaaactcgacataatgaggggatagcaattcatttcctttactatcaactccagtcacatttaccatcaaatacgggcctgttggttcaaaataactcgcgtcatcgccttttttatattttcctttgtcgaatgaacttgatgcacttacctcattagtaattgaagaaaatgagaataataacaataaaacagttaaaaataataaacttcttttgagcatggcgcttcctccaaatataatatatttgtttttattcatctctttttatagctaacacacttatttaagatgataaatatcaacaacttcattttatattgagaaaatattaaaaatcaagaaaatattaaaataaactaaacttacattaaaaaataattaacaaatatttaacattttaacctaagaattaaaatgcttctttcacaatcaatctctcatgccatatccactcattatgattgttccaataaatgcgacaccaaccatctataatttcaaacacatatattaatgttccaggcgcgtatacagcctgtccaacatcgaatctatagttagtacgattatcaccgtatctagtggctgaagtagcacctaagccgtcgattttcgcattaaaataagcaccttttgaccatttaaggttataaggtgctttacttccaactgttattttacttgcagatttaccgactgctttttgagcaggtgggttaattttatttgtgatcttattcattaagccctcacttttatacttaggtctaataaagtgagtacagccgtaataattatcccaacgtaactttgcaggcgtatttgcgttaccgtcatagttttgttccaaaattaaaaattgatttgtattaccaccattaaacactaaaccaatatgaccgtattgtttatatattcctttggtaaatacagccacatcacctatttgtggaacaaacgatggtgtgttttcatatactgttgccatgtttttaaaatcgttattgattgcatcttttgcatttccccacattctaatttctaacaaccaataaatgtaatcaactgctaaatctgcacattggtaaccataccaaccgtcaaaatcaatatatctaccttgataccaacgtaaccttgctcttgcttcactgtatgttttcattattttacctcctagtattttcttcttggttcttcatattctaaagcttggtggctatcacctatacctttagtagtcgggtcttgaatcacaccagttaatactaaaaatcctaatatagcgtttaaaccgtctgttaattgctctgtataaacttgaatatcatacccaatagctttggcgatgttttgagcaaataaaaagatagctgacaatatcgctacccaaaatgatttttgtttcattctaattttccaattaatcatattcttatctccttttatccaaaataaaaagacgactaataagccgtctatttgatatttatattatggtgtgttaatttatatatagaaaaagggcaacatgcgcaaacatgttaccctagtgagcccgttaaaaagacggtggctattttagattaaagattaaattaataaccatttaaccatcgaaaccagccaaagttagcgatggttattttttattgcttaattcaataagcttgattactagacctatcaatgcaataaggaataaaccaaactgcaacatggtactaattgtaatcattaggcgtctcctttctaaagatttcagtaatgccaccataggcaccacctccttatactcagatagccaccatctatccaacttgctcaaagcatattatagcacatatactttttttactgcttgtatactttcagattattctcgctttgttcaaaactatctatagaaattttttataaaacttacaaacagcagtaaaaaagtgaatgttttaagtatagtaataaaataacttatggtactttttatagattttaaattttttcagccaaaatttcactcaagttgtatataaatatatatcaatatgcatatttttagacttaatcgttttattatctctatatatcctcaactgtgtatctggatattgtccttgagcaccaaataaatcataaccaaccgaatcaccagaagaagggtgaaactcaattaatcctctttgtatttttccattaaatgcatctgtgttatataaattatatgtttcatgtaaataatgtcttgactgaaggtctagctcctgaacagttacttcttttttattagttttaaccgttcccaaaggtactgtattttgtttaccatctatccataagttaatcggtactttcttttcttcctccaattgattattatcatgtaacgttacaccgccatacatacaagctgttttgaatggtgtacccccagtacattgataaccataataaacaccatataaatccacttttttccctttgtatatattggcggtgtcttttgaaccaaggtctactaataaatcattataccattgatgacctgtaaaaaaatcattaaacaatatagtgttctttaaaaattgatcattactctctttattttcaattatagcacttccattatgataataggtttgtctaagattgcttaaagcagttccctgcaattcagactttttttgtaaatcttttccatttatttcttcgcttttctcgctacaatttacaaatggacttgttatcaacgttagggcaataaatgaaagtagtataaatgttgttttttttattttactcacctctaaagcataattccatataaacttgttattatccgaaatttttgtataatagattatttttgttggagtaattattagttatatacaataattatggaatgatcattatttacttatacatacatatattactataccttttttatacttgtctataatataataaaaagatttcatttttactctattatacatttcagatatcttacttacttggtattgacaacacttcccaacttcacttgcagtatgcttcctgtcttttgagctgtgtaataccatgtacgtacctcttttcaatcaaaataaaaagccagtgccgatgcactgaccaaaaacattatttacatttacgaccatacaaataacatgataaccatcttgcccaactcattatgtccacctcccttaaggtaataacgcagtaattgatgcagtaatgactgcaatcataacaattgttacaagcgcccatatggcacctacgagccatttattttgggcgagtgtcttttcttcatttttttgcgcaacatctacttgcgtttgatatctttcttcaattctgtttaatatctttgtttgctctaaattctcatctacaactttatcttgcttatctttaagttctttatgagattctcttagttcattatgatgttgcttatgttcctctctaagttcaagcacatgatcagctgtttcgtttgctagtatttcaacatcatcaacacgttcaactaattcagaaagctctttttttattttctgaatatcatccaaaactacacctactttctaagaaagctatgagcgtaatgctcataacttagtatagttacattgtttcgctatcaactgatttatcagatgacaagtcagttctatccacaacttctttcacaactttcacaccgttttgattgcctgttaattgatataaaagatttaaagtttcagcaatctttttagcgttttcctcagatttaaaatcttgtgcataacttgctgaatcggacgttgtaaaactgcctacaaaatcttgatacaaaacgcgctctgttccctctttgtcaatttgtactaaaataaatctctctgtttttttgataatttcatttgccatattaaatgacctccttaaatttttgtataaaaatagtgccaaggattactcttcctcagcacttttgcttttttcattttgttcttgtatatatgcttttaacattgcattttcttgtgttagtcttgtgatttcttgcgataaatagtgaattgtatattgtggattggcttgtaaaccttgattgctatcattcatttattaattcctccagtttttcgatttttgattgctggtttttaataataggtattaaatgaacccaaagtctatcgtatgcgataccttcgatttctccgttgtcatcataaataacaaattcattaaatcctaattcttcaacctcttccgctattaagccagtatgtcgactaagtttaaaagtatcatcagataactttttaccactttccaattctttagccattatttccgattcatatttgtcaaaccatgtacgaattggaagctttaaaatctcttttgaatgactgaactgatcgtcttcattgatgtattggttttcgattgaaattttatactttttggcagaagtagcacgcccaattgttccagcagaagtaatgtgtaagttagcaggtgctgaataagtacgcttataaatagaattagaagcgactctatcgccagcattatcagaacctaccgccaataaatcataactttgaatgctaacgtaactatttccatctcttcgtttaactaagttgaatttgcccatacctgattcaattgtagtgtctccgcctgtagcatagtcaccattaacgacttgaaccaatcctttattgctacgtttagaaaatcttaatccagcaccgtacttatagttttcatctgaaccaaacatgatataaccgtcagtttcgtatgcactatcagcgtttgataatgtgaatgcgaatcggtttaaaccaggtttatttttggtgttcggagataaatatatcggcgcttctctactttcaatattagctgaagcatatgaatcgataataattcgattgtagtcagatgttaaagcgactacaccgccataagaattgattgttatgccattcataccactatcactgtaagttttatcccaccattgaatagtaccggatgaacctccgtcttcgccttctccatcaatatatgttgaaataccaaaatgtgacatataaagtgaaccgcctgcggtattatttctaaaccttagatgtccatctttaagacgtgtgaatatatcatcggttgatcgtttgcctttccaagttcgttgtacgattccgccaagttcaataaaatcattttgaacttgtacataacggttagcatttccgcctttaataccaattctattcacattgatgtcaagaccttcatttgataagtttaggctattaacaatgtcatttttaccaactttgttattaatattatttgcgactacattaaattctctattcgctgttatatcaactttatcgccactaattttcacgccatctttatcaatagtatgtgaagtaatcgccccattttcgtcataccttaaatagatgcctttcatagcatttacagtgatgtctgctaacaatcttgatagtgttcttttagaagcattaaactcttctttagtagttcttaatttgatttccttaccattttgtataatttgagaaccatagcgagtcaatgttttcctctgtgcatctgtgctttctttgaccttgttgtctgtataagcattagctttcttttcagcgtttctagcctttagttctgcgttttgttttgcctcttcaagtttagcttgagcatcttgtatagcgcgttgctcttcttccgaaattttaccatcagcatacgcttgcgattccttctctttaagatcatcttgagcatcaatgtatgattttaaagcttcttgcgcttcttgatttgcttgttcaatacttgctttaatctcaggattattggacaaatcacttaactggtcatcagtatattgtttttgttcttccaatccgtttcgatattcgtttaacgtaactttatctttgatttcaccttttaaagtcgttctctcagcttcagcagtatctaaacgttcaacaataccgtctttgtctgttttatagtccgatgtttttacatagtcacgtaattgttcttttgtggattctctagctgcttcaatagctgatttaacaacattaggttctccgactaactgcaaatcttcattcaccgttaaaccaaattttgttgctattatttccaacgcttctttatatttttcatcagtgtattgtgactgtaataatttaaatctatctgaaatggcgattttgacatcttctacatctgtataaacatcttgtaatttctttctatactcaagaaataaagcttgtgtatctaccaaccgaccaatcgttgcagtttcgggtgtcatagattctaaattatttttaatttgattataaacatcaatcacagcgtctaaacttgcttgtaagtccgctttcaaatcattatctactaagtactcgctattcagtaattctgtagcttctgacaaaagactagcgtgttgtatagataaattaataaaaatattgtttaattcactgaatagcgctttctctcttgttataccacctaatttttcaacatcatttggtgttgcttcaatccatcgaccattccaatatctacgcaagacagcaacatcagggttacttgtatcataccaaagcatatcattgactggattttctggcggtgtatcacttttgtgtattttgcgttcaaagtattctaattcaccatctacaacatctttaactatagtgttgatattgctaatattgtcgtttaatttttggtgtattaggtttaatcgcttgttaaactcttctcgtaattctgattctttgaactctttaggttgaccgaatgtatatgtgctattttctgaaattatgttatattcttcagcaataacttctgcctctacatacaatggcgggttaaaatctctatgttttactctgactgtatcgccaattgatataatctcgtgcggatacgtaacttccaaatcagtagaagtaatctcatatgacataactgccgacttacgtttatttaactctgttttggctaaagaacttaatcgtgtttcattcatattttgatcatctgattgtggttcatatatcccccaaatatagcgcataggtaggttgaattgactttgcgcttcgtcatctgtcacaactagctctaaacgcttccctttgtcattttcaggtcccacagcaattaatgctgttttgatttctgacatatcaatcttcctagttaacccaaccaaatctttaccatactcaatttctttacctttgaataagctgtttttctttttgagtaccacatatctacctttgacggtattagaactaagctctatataaaaatccaataccattttataggttgtacataattgctttaaaacttcatatctagtttgataagaagtccatgacgtagtacgtaagccatcgtattcggtttgttcagaaacttcccaacctgtatcgctcaacacatctttcaatgcttctgaagttgtctttttctcaaatttgcctggtgcatacggtttagctgttgttatatcagcaagataagacgctatacattctatctctgtgtagccgtccatcgtatcttgaacccagttaataataaattcacgccattgtttgtttgaatcccttataataacacgatgtcgttcacggaacttttcagctctttctgatgatatgagcagttcaagcatttctgaattgtcattaacattacgtttatgaatcgctctaactaaggaagggtcatcagtagaaaggaaatctataatcttgtcgttaaaatctaaaacatgtatcacactctcatctcctttctataaatatctatcttgccatttaaccgtcgtatcaaagacgttttcaggttgtatgattaattcactgtacccagaatcaacattgaaataattacttccaaacgatttctcgctcaacattggttcctcattgatgacaacactttttgcttgcatatctattttcactaaatcacctttttgtataatgacatcccttgcgcctttcggtttcggtagaatctccgtattgaatgaacctaatccattcatctccatccacttataaccgttatacttcgcactatagatagctatgatagaagctggacgctgataaaacttaccgccatctatccactctttctcatccatatcaataggtttacgtctatctgggtctttaatgtgatcaaatttccaagttttaatagaaaatttattacctactcttctgagccgcatataaacaacgattctgtccaagttatacattatcggtttattctgatagtcgtatatctttttggggtctcctttttggttatacaacgtaacaacaatatgtcctatttttctatcatgatatttattttcataaccaatagaagcaagtaacttaccatcactatcataaatatgttgtgctgttcttccggcacctttacctttttgttcaacaatacatttataggtaatttgaaaatctgtcatcgctttagggagccctcgtttcgtgccagcaccaacccaaccttttgcatcaggaaaattagttgctttatatccttcgccaagattggatatcacaaagtcaccgccgaccttaccacctaagtcattacttggaatatcttcagtaatcatcttagtccaacctttgaaatcacgaaactcactatgataaacaggaggcatgtaatccttaacttctttggttacctcatcatcaccaaccataaaataatcttcatcatttttagtaatcataaagtaactagatggtttaattgctcgggcttcaacaattaaaggagtgtcagcagtcccactatttacaactgaaacttggtctgaaatcgcagtatttttatttcctgttactgaatatttgtaagggtctgttagtactactttgatagtgaacttaacaggtattgcaaattctttgtgcagctttattggtccttcaaaataagcgttccagtaccaatctttagatttgaattgtaatttaacttgttcctcgtagttaaaaaactttactaattcattcaagacgtcatcatgtgttttaatgccgttgtgagataaatagtcattacgtaccaccaaaggtatatcaaaactataagattcaagcctacgccctttatatatagaccccgaacgtccatctacattttctgtttttaaaacataattaaaagagggtatttcaaaccctctttcgacatacaaccaaggaattgttttgttgttcactttaatagtgtctatcattgaatagcaattcctccttttctaaactttacttttgttgattcttgcctttctcgcttttctatagacgcgttcacctttttatcaaaagcgtattcgtcaataatcggctgataatctttatctgcaatcacatcgttagattgcgctatcttcagtaataaagctatttgttgttgctgttgttcaatcattttcaataataagcttgggtcatcaaacccatttacactagataattgactaggtcgtttattcttacttgcgtttttccctctaacttccgcagctgcataatgtaacatcttcattgcatcatttctacgagctggatctgttggaataacccattctggatgaccgtcttcacctaagttataccaaccatcaaaaacttttccgcctgtagcatatgcgtaatcacccgcacgcttaaatccatcccaaccgtagcgtctaacaatgtactgcattgctgaaataccttgatgaaccggattattaaagttagtatatccacgtttagcgtttgctctaaaagttgagccgatgatttggaataatcctcttgatgggtctcctctttgagcatttatatcccagttattcactgcatttgactggtagttactttcacgttttgcaacgcgcatcatttggtcatgaatccacttacctttataacgaccacctaaaatactttgcgcttgtcggattactcgactggcataagttgcgccacttccagaagtagcaccgccaccacctattgataatcttccttttttcttagcattccttaaatatggttcagggtcaaaatgtcgtccatttctcctcatttcaaaatgtaaatgtggtcctgtactaaatccggtattaccagttaaaccaacaacatcaccgggctttaccatcgtgccactaggtggtgatttgctaaagtttttcaaatgcgcaaatagcatatcgataacgccactagtaatttttacataattaccataaccaccagacataaatggcattcttgtaagtctgccacccatcggcgttctaacttcttgatatacaaatggaaaatcgacaccttcatgaaatggtcttccagttgcagcggtataagctgcggtacgtccataatgataattaattttgtcagggtctaatattccgccgactaaatcgccaccgcccatagcttctaaattttcttttatccaatcagtagcacttttcttaatcttagaccatgcagcttttgttatgtcgcctgcaattcccatacctttagttaaagaattgaaatcaattccaaaagcttcaagtatatattttaaaagtttgcctggattttcaataaaatctaaaacatcgccaactttatcgccaagccatttggtacctttacctatttgatcttttgtccagttaaatgccgatgatgcaccggatttaatatctttccacatagtacctatgctaaatcttggaagcgttccatttaacattgaataagtttgtgcgccgttatatacttttgaacctttaggtaagtacgctgtcgtatctgtattaggcgtaagtacccgtttgccattagggaattcaatcatttcatttctgaaaccattcggaccatttccacgtcctttatccccaaccgtagcgaacgtatcccgcgcaatcttaccgttcttaactaatcttgtagtagtatgcgtatgttcagtaccagtgtgtaacttcggtattttgtccatacccaacttaccaccgacccagtttaaaccttcaattaatttattaagacctcttttaacagcgtctaccataccaccgatatgatctttaattttaccaatgatagattttaaaccgtcacgcatgcttccaaagatgttacgcactctatcccataagcgaccagctatacctacagtgttatctttaatagagttccagatgtttgacatccaatttcttaatttaataaatatatctttcgtcgcattccataaacttgtgaatttagaccttacacccgtaaataacgaatgagccttgccgacggtattgcttttgatattattccacgtactagataaccagtttttcatattagtgaaaatagatttaacactattgaataagaaaccaaaaatactttttgttgcattccaaattgccgataatgatttcttgaaaacgcctattatagcaacccatataatagttattaaaccttttagcaatccgccaaagtacctaacaacgccaagtattttgcctacaaaccataattgaattaaattccaaattaactgcacagtacctttcagtatcattacaatgccgtcccaaacgcctcgccagtttcctgtgaaaagactagagaacactttgataatacccaaaataatattaatagccccttgtattacacctttgatattttcccaagtgctgacaatcaaggctttaaccgccggccaaataaattgcatcacttgccagattgcgaacataattggtttaattacaaaatttaaaataaattcaaatatcgctttaataaagttgcatatattttgaagtgcttgaacaatggaaattccattttcattaaagaatccattgatttgactccaaatatctttagcaaaatcaactattgctgatatcgcttgtttaaagatgtttttaacagaatcaatgaaaggttgaataaattgaataaaattactaaatgtttgtttaacactttcaattgcaccattaacaaaatttctaaatgtttcagatttcttataagcaattgtaaatgcgactgctaaaccagccaatacacctaatacaatgccaattggaccagttaaagctgtgaagacagttcctaatataggtactttagtcgataaaaaactaatcaatccaccagcctttgcaatactagctaataatggagctaatacagttactgcgttgccaactgtgcttatgaatgcacctaatccaaaaactacaggaccaattgcagcagcaataccaccgaatataacaatcgaccttttagatccatcacttaaacttgaaaaccaatcaactgctacagatagctttttgattaattcttccatgactggagcaaacgcactttcaatagaagcccatacatcagcacctactaatttaagtttattcattgctactttaaatctttcggagccactttcagaatctttaaatgtctgattgaccgttccttgcgaatcttcgatagtttttaagaactcttggtaactaaagcgaccgcctttaatagcatctgctaaatcaggacctgcttttgcaccaaatgcttcaatcgctaaacttgttgcgctagctatatccggtgtcctttcaatttctgctaatgtcttcttaaattcttctcttgggtctttacccgctttaccccaattggatatagcttttttcaaaccactgaaggctatttcagtattaacacctgatttctcccattgagagaataaagcgattgattctttcatctcaaagcccatagccctcattggagcaccgtatttagtaatgctatcagctaatgtatcaacacttataccgctagcctgtgctgctttcgctaccatatcaagtacactttgatactcatcagcttcaatacctgcatcacccattgcacgcgtaattaattgaacggcttgtacgccgtcagaacctgttatgtgactaaatttcaagaatgactctgtggcactctcaagttctttgccagtgaaacctaaccttgtgttaacttcccctaaaacaccgcctacagtctcagcgtcttctggaaagttgccataaacatctttaaatgaattctgcaacttcttaagctctccgccggttgctcctgttgcttgggtaactgtatctaaacctttatcaacttctgcaaaagcttttcctgatgctgctgcaatacctaaaacaggtgcagttacaccaatcatcaaacctttaccaatggattttaaaccatcacccatttttgttaatttaggtcccatactttcaaaaactttactggtttttccccagccactttctgccattctttgagcttcaacttgagcttttttgaactcttcaaactcagttgttgttttttctagttctttttctaaaaaattcagctcatttgcttgtttgttatattcttgtcgtaatttttgagcttccgcgctgttttcgccctgttcttgagataccttgccatattgcttggctaaatcatcaacgtttttcttataacctgtgatagttccatcaagttctttaatcctttgtttgtaactatgagttgatttttcggtatatttgaagttgttaccggttaactttaagtcagaatttaaagttttaaagtttcgtttgatttctgcaaatgatctatttaaatttgctgcatctaaatccaaacctatagataaaccttttattctttctcccattttttacctcctttctaaaaaagttcaaaaaaataaccctaaccaaacggttaaggttaaaacgcatcaattaaagcctctgctttttcttcagaaatgtcattgtttttattttgatatatggaaagtacataatgaaatggcatttttaaaacttcgttagcgtctttaccattttcaattaagtccatcatgagagtatccatatttttcaacattgctttatatgttaaatcttcaggctttatttcatgttctggataaaatttctagtttcctcagtttgctgaccttgagtaatgaaaatcacttgttcacgaagtgcattcattccatcaggtgcatgcatacgttcttttaggtctttaactgtgaattggttatcgtaaatttttacaaccatatccatcaatctgtcagcgatttctcttggtttcatcgtgctattttcgtcctcaatatcatcgattaaatccattgcttcgtatacaatttcaaatgaaatgaagtgtggtgttaagtacgtttgtaatttaatttcatttgctttcgggtcttctactaattgaataatgttacgttttaattttgccattttataatactctccttattttcaaataaaatagaggggttgccccctcttatgcttctacatttattgttatagtgtcactcatattaccaactgttgctttaaccgtagcaatgccttgtgcttccgcagtaacttgaccatcactattgattgatacaatattcgtttgatctgttgtgtatttcaataacttactttgattagatggctctactacaacatttaaatcgtatgtgtcgccaactttaagtgttttaatgctatctggtatattaaccgactttaccgcagtttccgatgaagccggttttgttacaaagtttcttcgttaccctctgtcacgtttccagtatattcttcgcctaaaattttctttaagaaagcctcttcgcctttttcaccgtctccatcatgatttgtcatgttagctgaatcaaagatatacttacgtactgactttttattatcaactaaagggaaaagtgcctcaccttcaacctcttcacttgagaaatcccaatctttctcagccgtttctccatcgattttaggatttgtaaacataactttaggtaataaaactgttctaaatgtaccgtctctacgctcttgtctgaaccatacagctacgtaattgttttgtttaccttgtttctcttcgtaaacgccatcttcatcataatcttcattaaaaacaattttgcgaatctctttagggaacgcatgcatttgtaatgagattttaccttctccgtctgtattccctgattcaattggaccgccatcagcataagctgtttttagttctccaccagtttcaacaccaattttttgtaatcctcttgtttttgtaatatcactatattttaattccgcgccttctttcgttaatttagcgaaacctaaaccagtaatgttaatatacgcctttggcgcacttgcatgttttactgccatttaattttcctccttataaaaaatgccctcgtaaacgcgagagcttctatatgttttaaattcttctatatattccggttttccatttgaaacatttcccatttttagttcagaccataataacttttgaatgcgattagatatcttatttcttatgattctcgcattatattcatcattgtacttaacaaaaacatctatttggacaatataactatatgcacactcatctccgtcagtataagttgtaggtattgggtcgtcgatatcgtcaataacaataaaaggtacatcagtatcttttacattagggtatttattgaacttaatattattgatatttacgtgctctctaataattctgtcttgactaatcacttcatgaactttgtacaaaatatcaatcacaattttttcaactccctttttagcgtctcaaaatacttattttgcccttgtcttattgctctattaacaccgcccatagctttaggtttgataaatttacctgttcctttttgaacgtgtccatattcaattaaatgtacgattttataacggtctttagaacctcgccaatgaacagtaattgtacgttttccgtttatccattcaggtttactaaaacttacctcattaattaatgctcccgtatcttttgagggctttagttgtttttttacttcttcaacaattaccttagcaccagctattaacgccttatcttgaacttttaccatctcttttatgccaaaacgtttttctaattctctttctaatgctttatcacctatcactttcacactcatgaactatatcctccacgaatcataataaagtctttattatccaaatctggtgatacttgctttatattcaaacgatttttgaaatatcttgattcaatttcaagataatgttcttcactgggtaaataatcaccttgcggatcacgaatatacaatttaatgtcattttgggttccgtttgagatagcttgttctaattcacgtaaccagacaccatcaatactcgcccaacagctatataataatttttcttctttttctccagcttctggaccattattttcagtatacttataaaaatgaacacgagtatttaaacgtttagttgtaattctaggttttttaaacactttcttcatcttctgatacctccattagagataacgaaaaatctattatttcaggtctgtaattatcgttgaagtgttctaataaatcttgataagcatatctagcgcgtataagtatcaattcttgacctattaaattctctaattcaaaaactccgcactgattttttatacgctcgtacgacatttttaacaactgctttaagtactcatcctctgaattatggtcaatcttttcaagtgatttaaatttgacaagcaaatcatcaatcgtcattgtcttcaccattcaataagtcgacgatttcacttttaaccattgaactagacgcttttttttgtaatgattcgcatagttctaataattcttgttttgtcagcttatctaaaggtacgatataaactttgtcgtacttatttttgatttgatttgtcaacaattcaacacgaggattgttatacccttcagctggatacaactcccctactttgtacttgtgttgattgtgctctatgtctttaaaagctctaacaactttaaatttcaccattttatcacctcataaaattttatagtgtttcttcggtaccttctaaagctggcttatgtccttttaaatctaatttccaaacagcagcaactttattatctttcgctttgccgtaagcaaattgttttgcagtgtataaatccatatcatctaacgcaagtgtttctttaaatttctgaacattaataccaccagctaaataaccatcatataaacctttaacgtacgttaaaaccttacctgcttcttggactgtagactcgataacattcaaattaaatggtaaagcagtaacatatacgccatttgcatttaaatgtgtatactgtgcttgaacctcaaaagcatcggacggattaacaaccattgttacattacctttaaccgctactgatttacctttctcgttagttgagtggtatttaaacacttgcgtcaattcattaaccgtagcgcgcggattagcaaatgtaagcgtaccttgttcttctttctctggataagcaccctcagttaccgatacacctttttgtacttgacggtttaagccgattggttggtctttaccagtaccttttaagaacgcagtttcaagcgccactgcaaatgcttcttcgatttgaacacgaacaaatctttcaatccacgcaggaccaaaatcatttaaatcttttggtaaaacaacaaacgctgtcaatttattttgaattgctgtttcttcactgaacgcagcatctaattgacctttaatttcaccatagattttaccccaaacggctacgccagaagtttcagattttaagaacttcaaacgcaaaccagcgtttttaatacctaaatcagctaataacggatgattcgtcgtcaaatcttcaaaaattctatcaattgtttcttctggcaaaagtttttcttctttatagttaacgtttttattgatatccatgaagaaacttctttggtttgcactcaaagattgtgctgatttaggtaaactagaaactctttcagcttctgcttttgcttgtaatttagtttcttcaaatagttggttaatcatgtcaccgtacaattcattttgtctttcttgcggttcaccgttgtttactgcattaataaattcgtttttcgcatttgcgaatgtttccgataaatttatagtcattttatgacctcctattttttgtattaaaaaaggaatcttgaaaatccatttgctgatactttactatctgcaacatcgatttctgattccttttctttcatatttattttttcaattactttatttgctattgcgtcaatatcaatgttaacctctggcgttttacttaccaaagctgttacacgatttaatacatctttcgataacacttgtgtattgcttgctacaatttgcatattgtcgttttcaaacattttactatccgcaaaaccttgttcaatggcttcatcagcatttagccacgtttccctagccatcatttctacaagttcttgtttgtttttaccagctctaaccgcatatgcctcagccattatttgaccaacatgttctaatgtttctgcagcatgatttagatctttcgcttctccttgcgcaatacttgaaggattgtgaatcatcattctagcaaccggactcatttcgatgtggtcaccagccattgcgataagcgatgccgcacttgctgctattgctgtgatacgaacattcactttgcctttatgagctcttaaatgtgtatatatttcactaccagctactaggttaccaccatttgagttaattataatatcaacatcttcatcactaaattctagttgtgttaaaacatctttaggacaagtcgaatccataccaagcatttcgtaaacccatttatcttcgttggaaacgatgacgcctttaatctccgctttcatcttcatcaccacctttcaaagtgttttcatctttttctttttcatcattttcaccactgttagctttttcgtagtttttagtaatcaggtattcgtctaattcaggattgtctgatggttcttcacctaacataatccgcacctcattccttgtaaatgaaccagaacttacaagtttgtcaattgcttcagcatattgaagtgggtcttttttattcacaccgacaatttctattcttgtatctttcaaatacatgctttgtgttatgagtttcgcgtttaattcgttctgaatcttttttaataaaggtgttaaacagaacttctcaaatacaagcgtgtttttttccaaatcagctgtttctccgtaaatcaaacctggaggtataccaatcatcaacgcaacattttttattgcatctctcattagctcactcaattcagaaaaaggcatgttactattcttaccaccattagataattcctcataatcaaaaccttctatcaaaggcgcgattgctagttgatttttattaaaagtattgaataatttatttgtgaacgcttgtaatttttctatattcttttcgtcatatgcgctagaggcagatttcaaaatccctcttatttgatagttttttaattgtgcacctatcattcttccgaatattttcccgtaatcttcgaatagactttctacaaagtgtgtcactttattgttgttgtactttaaatatatgacctcttgcattgtgaaagtacgttgataagtataatctttaaccgttacatctttgaatatatcatcatacaaagcgtactcttctctgtaaaagctatctgcgataagtaattctttgctgtcacttactacgattaaaacctcgttatcataaattagtttatatataacttgttgccaaaaactatcgcttgataagtcagtatttggttttatatttaacttgtagtaaacatcattcttttgaattctattaccttccaatactttaaaatgactttgagcgacagctcgcgcaacaaattcaatacaactatcaatcgctaaacgtttcacatacgcttgttgtgatagatcttctatcatatctaaatcaagcatatatgttatatctttcctagttttaaatatcttttctagaatactcatgtctcacctcctctattagaaatctatactcattaatgcatcaagcgctttagacatgtctttgtctactatatcgtctgctctatataatgcgtgaacaaaagccatgaacccatcggtttttcttctattttcatcttttttaatatattctttattaccatcgggtttaacctttactgcaacattattagtaaaccaacgcatcaaaggattgtctccatatattacgttatgtttcgcaaacattgtatcgatacgtggtgcaagtaatccatgtattgcttttggatttctaagtacttcaagttttatgccagcatcctcaaacgcacgtcttacaatatcagttctataattatcagctatgactttttcaagcccatatttttctctagcctttaaaaaccaatcaactatatattcaatttcaatgacatcatcatcgacaatggtcaataatcccattttttcccattctttaataggaggttctaatttgacatcatccaaaaacccttgtcttacaaacgaatgtcctaaccaaatgtaatcatcgttttttcggaataatagccctacacttgcaaaatctcgaatgtttgcaaagtctaaaccaccaatacacatttgattatctaaatttggtatctctctattagtcgctagtatttctttccatggtgctattactttttcaaggtcaacttcaggcaaattcattcgcttagtcatgaattcgggcttatttgaacggttgaatggtaaatcgttatattcttcttcaatcgtgcttagcagtgttttagcgtattctgataacggtttatgtaacattgggttcgccttttcccacgtctgtctgtcatcaacttcttttggatcgtctaacttacaataaaaagcaaacaatctactatttttaaccttgccacttaatacacttgcaattttgtgcttcattgcatcgatataaccctctctaacaaaaccatcagtacttatataaaacgttcttctatttttctttttacctaatccaccacgtttgacgtttaccatttcaggaccaaagaaataatgaatttcatcaaaaataacacacccctcacgtccaccgtctttggtttttgtgtttgatgtgttatatcgaataaccgatttagttgcacggtttattatttttgctttactaacttcataaggagcttttggcgttttacccgtcttatttcgtttgttatccattaaaacggttctgatttcatcaaacgatgtttttgcttgatcttcactattagcaacaatggagatgtgatattctttaactccgtgtaagggcgtagaaagaaaatcactaatagcacttattagaccgtttttcccgcctccacgtcccatgaaaatagcaaattctgtaaagaaagcttcatctgtatttttatctataagaaatatattagctatgataaacctttgaaatggtaatgttggaaaataccatttttcaataaatttgatacaatcctcgattttctgttcatcaaaatatacatcatctcgtgaatatatatgtttttgtagataattaaagagatcaattctttctttatttaaaattatctttccttgtttccacaaatttatatattcatcaacgtatttattactaatcataggtaatcatcagatggcgtttctgtgtcttctttctcttcgggcaataaatccgataattgtttgattattttttgatatgcagcatctctagcattaaatagtttggctactggtctttccctttcatatggtggcgccttttcagattgagtaaataaatcatagtcacctttttcttttatgtcttcccacatgtaatcaagcattacacgtagccttgctgcttgaataattaaaccatcaactacttttaatttattgctaggtatgtctttatataatacttgcagcctttctttttctttaagcactaagttttcatcaactataatctccatttcatcacctgccttaaaatggttataagaggggggggttatacatggatttttaaaattatcgcgaagtcgagcccctccccgttccccaagtattttgatcgcttttgatttttttgacccgggggtatttaccatttttcgtctttccatttattttctttttttataaatctcttttcttttttgttgtgacatttaatacacagtgtttctaaattgtttaagtcatgagcaaactccggatgatgttctagcgataatatatgatctacatccaacgacttatgtttgcttttgtcatatgtcgttaacttgccgtctctcttacattgttgacattcataattatctctttctagtactctttttcttgttgtttgccattctttagacttatagaatcgtatacgttcgtctttagtcatcataatgtttcaccttatataacttaagtagtatcaagacgcatctatacttgatgtgtagtaatgtatttacaattagtttgaacatgttcatacctcataaataaaaagacacatcacatagtaatgcgcctcttgttcatgcgtcgtattagcatttaataaccttaaatattaatctgatactaacataataaactgttttaatgcggacttacatagggtaaaagtccgctacacataaccaatatactttgctaacttatcgatcagtgcattccttctacgtaatatacttgtcttacttgtaccaaagtaatgtgctatatcttcccattcataacaaccaataggacaatcccaatatctaaaccttaataactcaagcgtatcctcatcactttcatctatcaatctatctacaccgttaactatatttcttaatgtattgtacctgttatcactaaacttctttattgcacatcgttcaatcggattacccggcaaattacttttgccagctcccgcattatctggttcatgactttcaagtaattcatattctcgcatcttcaactctcttcgatagttatcgatgtgctgaatgtattcttcaagctttttgatatcgtgtttctcaatctttatcattcaatgcaatacctccgataatataaattactttttaatatcgttatttattcgcttcaattcaatcctgtattcttctaacccgttgtatcctttagttttaactacttcatcaagtagataatcattcatatatctgagtgcttgtatctctcttgcatgatcactattaatactgatacaaactaatagcaatatagcaaatacaatagtcatagtaatccacatcactcacttacctccgctcgaaagacgtaatcactcggcgcctctacatcatcattagctgtcatcataatatatacttgctcagttacatacttacctaactcgtacattgctagtaagaataataatcttagtatttgcttaatcatttcccacactcccttatattttcaaacaactgccctaatttaataactgcacctcttttaacttgtgcctcgtatttgcgctcagcttcttctttactctctgcctcaacaactgtaaacgtctgattatctctagcagtagtaaaatgttcatgtggttgtcctgttgaatctttgaatgttgtgactaagtattgtgtcattcctcatagctcccttgaacttgtttgagcttactcataaaaaacattactaaaaatgctattaagatatgcgtcttttgatgtttataagcaattgtagatatcataaagatagtagcaagcattaacatttcatatatgtttgtgtgtatagtctttttactcttaagaaaaataattgctatgcgataaaagagataaacgccaaaccctattaaaaatatttctaacatgtcgctcacttccccaaaacctccttgactcgatccaagatgtctttacacgtatccttttcctgcgtctgctgttccatcttgtctttcgtggttccttttcattttctttttgtatgcgtcaatgagttggtcgattgtatagtaagtattggcgtacaaaaaaggcattattaaaacttgtacaatactattatcaataccttttacaaattgttctgttagtgtatgcattacatgaacaaaataaactgaatgtagtttaggtaaagtaacttcattttcaatcaaatcaaccataacctcagtagtttcttccaaatcttcttcatcaacaatagtcaaagttaattgcaaactgaaagctaagtaatcagcaatctcatctaattgtgtatctaatggcttacctggttgtttcttccaatttttaaaaaactcaagtgtgttaacccactccgcaaattcaataatcatactagctactgtgtcatttaaatttctagtcggtattctatcgtcgaacttcttttgtatttgtaataactcttgtaactgatcaattgttaatgtgttagtcattttccttgttcctcctcatatttatagataacttgacctgccataattcctactgcttcatcaagttcaataccttctttaactgaatgttgaatagcatttgtcattccatcaagtatttcatcaaatgctcgcgctttcttatacacgtcctcaatctcttttagcaatccctctgtgtcattgccgttatacgcactagcacttataacggattgttcaatttgttcacgattattcatcatttccatctcctctaaaataaagttagttgcttctgttcctcgtattccaaaccatgttgctttatatatatttcgagctcttcagcagtatcaaatgtctttttaacgctttgccaacctggcacgatatgcccgtgaaagtaataagtgccattcactacatggatatgtgccactcgttcgttatcctgatacagatatctcttagatccgaaaaattggtttaagtattctttgcgcgcgttatatgtcatagtcattgctcccacaagtcaaaagctctttggacataaaacttcgcctttgctaaatcctcgtgtccgtttttcaacggtgctctagatagatatttgattgcattacctattgcaaatgctaattgtggtggatactgcgccgtaacctgttcgataaaatctataatttcaatgtcgccgtatgtgtagtgcgctggttgcttaacattgtcttgtatttcattcatatctacttttctgttactgattacactcattatgcttcactccatttcttgaacatttggttataagtattatcaaaccagtacggatcacgtgaatgtttctgaggtacattaaacaagtgtggcttctttcttcttagctcagcctctctctttcgctttctttccaatttgcgttcgagtctagcttgttccagtctttctattgttttcttttctctgtactcgcttaaacgcgtaccttctggtgcgtccattgcttcatgtagttcccaaccgtcttttactctcttagaaaccattccagcggttataccgtgactttctattaattccatttcaaatttactgaacctataaggtttatcatttattgttacaatccttgcttttctcgccattttatccacctcttatatttcttctattcgtatgattattttgggctcaattccataacgctttgagctagttatttctgtaatttggttatcgtctttccatacatggccattacaagcatctaataccgttttaattaagttgtcgatatccggcttagtcactttatactgcccaaccatttcgcttttctttttcttcgaccatgatttaagcaatggaaagtaaaagtctaattcgatttttagtgcgcgctctagatttaacttaggcatttgcccttgtatatacgctttatgctttgtgtaagacgttggcatgtaagtttgaacaaatctacctgtattacgaaagcgtggacgaggcgaccccatcggcgcattaaacacttcattaaatttaatttctatctccatgtaatccctcatatatattcaaataagcttgtttggtgtcctaactccatttgttcattatcaataagtgtatttaattcataatcgtctaaataccaacgacgaccattaaattttgtttcttttattccaacaactaaatgccgaccatctttaaaatgtggtgtaactgaaaacattttgttgccgtcatgatcaaatagatagtatttatcaaatgcatccattttcaatcactcccatttgctatttagacgcttaataaaagcttctctgtctttctcaaggttttcatctacttccggcgttttcgtttctctcgtgctgtctgtgagccatttgggtgttttttcttttgattgtttaacgaaaggtttataattttgttttttgctttcaagttgttgcttttcaaatgcacgtacttgttcaatagatttcaagtttgcattaagccatgtattcaaaatgcttttagcatatccccaagtaactttgtttctgtctttagcgattttaagtgatgcggtaactatttcatctgaatcattttcaaatgaatcaagataataatttaaatcgtctaaattgtaagaagttatgaaaccgaatccgttatcttggaagaagtcgaaggcggttgtcttcttcttctcattattcacattcttttcattattatctttattatcattattgtttgtgttggtttgatgttgttttgatgttgggttgatgtttgactgatgttgttttgatgttggtttgatgtcgttttgatgttggttcctgccctgctcactttgataaaagtcataattgacaatggttataagggtatattttgatgttgttttgacttctaacattccatcactctcgagtaagtcaaggaaggttttcactttaaatcgtgaccagttaaaaaggtcagacaaggtcaaaatcgatgttaatctttgtcctctttctacggttacaatttggtttccaataggcacttttgcctttgaatgattcgcttccatgagtaaatatatccatgcttcaaactttgaaaatgttctcttttctttaaatagccaatgattttgaattgagcgatcaatacttatccaaccagtcatatacacacctcactttcaaaccggttaaattagaatggtaaatcattgtcatctatttcaatcggaccatttgcattcgcaaacggattatcttttactggtttgttatttgaatattgcgattgtccacgtgtttgttgtacttgttgttgatataaatcttgttgagtgtcatttgagtttttcggttctaaaaattgaatactatcagcaataacttccgtaacgtatacacgttgaccttccttattttcatagttccgcgtttgtaacctaccatctacgcccgccaacgatcctttagataggtatttattaacgttctctgcttgttttttaaatacgatgatattaataaagtctgcctcgcgctctccttgtgcattcgtaaatgtgcggttaactgctaatgtgaatgatgctacatttacaccactttgagtggttcttaattctgggtctctagttaaacgaccaactaatattgttctgtttagcatttataaacctccaacataaacgggcgcgcccgtcactttttgtatttcacttttaatgtattttgcatttgaattttgactacttaaatgaattaaatgtatttcttcgagtctagttaaatcatttgctttcaacattccgatagcatgttctaagctaaaatgagactccataattctgtttgctaatgcgctgtgtacactgccgttttttatgttttcttgcatttgttcatagatataattaacttctaacatcatgtgcgtaatgccgttaaatttgtatttcagatacttcgtatcagtaacatacaggaccttataacctaatgtgctttgtaataagaaagccacaggctcgttagcatcatgttcaatgtcaaatggtaaaattgaccacgtaccaattcgtagctcttgctttgccttaatcgtgcataagcgatgactttcaaaatccatagctcgttgtgttccagcagtcatatagctgattacaccattgtcgacaaactgctttgtgtactttgcatgatcaccatgttcgtgtgtgataagacaccctgctatatgtcttgttttatatttgaaatgcttttgaacacgttcaaattttattcctgcctcaagcagtaacgtagtacgtccatcatttaagacgtagcagttaccacttgaaccagttgctattgtttcaattaaaatggctcttcttcgctttctttttctgttgcaggttcttttatttcttcaaagtcagatacatcaataggtttttcattttctaattctgtgtattgtgcttcttcaaaaactggtggttcaaaatccaattgttcttgatttgcattttcttcaacttctgcatccaatacttctttgcgttgacgttgttcagattctttaatttgatttgataaaagactagcgtcatccgtgctgtttaaaatctttttacatgcacggtttattacagtctttttagccatttcttgagggaatcttctgtgtgtaccgtcttctttaaatacaccgttataaaccatttgtgattgcttccacgcttcttcaatctcttcaaatgtcatgatttcagtgtaatttctactttcatctttaaatacaactgttgcatatgcaccgataatgttttgtgtgtttctgttaccaaaagactgtgtatgttcaagttcaacaatttttccgtttttagttttatacttaacttcgtcaccttcaaatatgacttctgcattaatttcttctgcgcctgctacacgtttagttactgccattgttccgtggtaacttctttggaattgaaccttatcgccatacataatgaaatagccttgattcttagcaggatttaaaccttgtacaaccatgtccattaaggcgtttgctatgctggttgaagttgcaaattccagcgctggtttataaccatcttttttagatccttttaattcttgcagttgtaacattgctgacttcattgcattctcaggcgaatagtttgcaggaaactgtaaatctccttgtgcttctaatgtcttaactctagatagaacgttgtcgcccattttattgttttttaatagtaattcattcgtcattttatatagtctccattcttaattttttatcttgttcatttactatcaattgaatttgttgtgattctgttttgataagctctgttactgattcagcattatcaataaatattggcgctgtaactttaaaatgttttgatagtgtgttgatgatatctaagccaacattaattcttgaggcgttatttaaaccgctgtcatactcgacaccattaaccgttgttgaacatgtttcttctaattcgccgttaactaaggtattgaatagcttaaattcagcaatatcaaattcgttattgatgttttcagtaagcattttgacttttgttgttgtaaattcttttaagatataaaggtcatgtgaatacttttctttttcatccaataatctgtcttcttcatttcttaattcagaaataacatcatctagatgtttatttgatttttcgattgatattgacacttcaatttctgatttttcttgagtaagttcgcttattttgtcatctattcctgaaactttatcttgaatagttttcctgatgttagagcgtttttgattaatctcatttatctctaacattactgctttgtattcgtcagtttgcgtaacgtcaacgtgagttattttcaacttattaattttgttttgtattcttgctgaacgctcttctgcttcgttgattttaatttgtaaattattgttgtcatcctctaatttctcgataattggctttattttcttgccctctgaaataatgtgattgatagatgtttgtattgtttctaattctttcgatttgtttgcattgaatttctgcaatgctttttctcttacctcactcacttgttcagctggtaactgttgaccacaacaactacatacattgtcatcaagatattcaaatttttgatttttagctttttctaaatcactttttaatcctttatgattttctaataattgattacgtcgattttcttcatgtgtaatttgttgtttgttttgctttaatcttgttttaagattcgcaaccgttccattttcaacgtgtagctcatttgttaaagcatgtattttgttctcattactggcgctattattagcttctatgcgcttcaattctgattgtttatcagctaattggttacgcaaattaatttcttctgcaccgttttgaatatctatacgctcattttcaagttgctcaatttcttgttttatgattgtgtgtctatcattatcgaattccggtacatcctgcttattttgttgcgtttggttaatacgtatcggaatatctttgatatctttgttaatctgttttatcttgtctgtaagaatctttttctttgtttcaatttcgtgatctccaagaatattatttagttctttaaaatcatcatttgttttaatgacatcctcatcattgattggtttagcgatttcaaacaacaaacttcttcgtttcttccaatctagtaagttaaatgcttgagggttcgtaattaacttgaatacatcttcatcaatcagttcatcaatacgagctttataatcctttacttttattgattcatcattgatatattgtttcttcgttcgacttcgtgagtattccttgcgattcgttttttgatttattgtgtacttaggatgtgactcttttttaaaagtcgtaatttttccgtcgatttcaaattctgcgaaaacagtcggaattaactcataattttcttcgtttttttcgtttaaaggtacagggttaaatgatttggttgaaccgtctaaacccttatcgaaaagcagccattgtaatgcggttgctgttgtagtcttgccagtcgcattattgccgtatatttttgcatctttaccgtcaaagttaaatttttcttctttgattccagcaaagttcgatatagttaacttatttattttcatatctttcctcatgctccttttttaatcttccgatgacctcttagcacctcgataattaaattttttattcgttcatggctgtctggattgatttcatgtatctgcacaagcttattgtttgttttgtaactgtcgtgatagtgcaagaaattaatcgataagtatccgtgatgattacgttcaatttccaataatgctcgttggtttgacaaagtatattcgtcgaataacgtcttaaaaatattcaatatatttctttctgtatctctcatgcttatacctaccatttcatgactaagttaattagtctgtcctgttcatctgtgttattttcaatccattcataaatactttgtttcaaaatatctaaagctgtgtatagatcgttctcgtcagaaactagtagcccgtcaattgaatttccttcatgatctaaaacgactatttcgacactatatgctcgcttcttaactcttaattgaaaatcaaagccatctacattaaatatttttcgacatacgtcacccgttttgtaatacattgttttagtcctccttgtcgtcatctataccgagaattttttgtgatttacacatttggagaacattgacaatatctttataactcttagtgctatccaataagtaagcaagatcaaaagtatgaccaatcacagaacttgaacctgctaaataatctccgtcgataactcctattgatgagaaaagcaaaatatcaaatttactttctcccttaatttctttcgctaattcatacaattctgccgttttttcagataataagtcttttatttcttcctgcgtcatgtctttataatttttagtcatggttgacttcctccgtttttcgttttatatttaacttgaattttatttcttaaatgtttgttactgttacttgttggcgcaagtagcagtttttttattcttcataaaagtattccttatagaatatgaatgttgcgatacttgcgaatcctgcaattgaccatgctgtagtgaagtatagaaacggcataagtacaatcgctaagactgtgaagcatagtactgctactaggtagcttttataagttttactcatttgttgtgccctcctttgtaaatctcattaaaatgttcatctacaaacttatgcatccttcttgcgttaaacctccaacgattaaaattctcatcaggataatgtacgataccttgtgctcttaactctttttcgagtctagggtgaaataataacctgtctttgattgtttcatcagatgcaatttttaatttcttctttaagtcgctcatgttccatacagggtctaatgagtaagctattaactcttcatattcatcttttgtgataagcacgtgtgtttcaggtattggaactgttacgtttaaaatatgtggcatttctatctttcctttcgtgtataatgttgttatcaacctaaggtagtgataagtatgaaattagatcatgattgtgttagacatcttttgttagaaattgaaactaataaaaagattggtgaaccgctcaccgaatacaatttcaaagataatgttgtatttggaaaatatgattttgaaactgtaatgtatgcattattaaaactggaagaagcaaagtatgttagtgttaaattcggttgggaagatggacatatttatggttatacaattaacgatataacttggtcagggcatgaatttttagataatatccgagacaatcacacttggaaagaagttaaaaaagtcgcaaacaaaaccactagtatgtccgtaacattgctaagcaaattagcttttaattatctaacacaaaaatttaatctaacttaaattcttttccatctattaatccataaaagttattttttaaatgcggatgtctttcaagcgtcatttcaataaaacgctggtctatcattaagtcgtagccatcgttgtattgaatattaacgggtcgtctattacattcttcgtcatagtagtaatagatgacttttttgttttgagcttgcattgttcgttcctcctattaagatgtttgtttttctcctaaaaacttattaacaaagtattgttgtcctttgcctgttacttttggcgtcttactaattgatgtgtgaccgtccgaatgtgtgattgatgtttctttaatttcgaataactcacgttccattgaatactgtgtaggcatgttataatccacacccttgcgtttaataaggaatccgttttgacgtaaccactcaaacaatctgcgttgcccgatgtttataccgttttgtttaatgatctttgctaactctccaactaaaattgatgtcttagtagtagctactgcatctgcaaatacaatttttggtttatcacgttcaatctttgtttctaattgattgattgtgttgttagcaatttttaaagcacgttgcataatcatttctgggctattccatgctttttcaacttggatgaagtattgtcttgcacgtttgccaggttcactacgttgaatcattgcaatctcttttgcagtgtctagtgtgagtgcgtggtcagtttgattctgacgacctcctagtgggttatggacaaaaatgtccgtgactatataatcgatattttcttcaaatccgtaatcactcattctttcaaaccattttttgtatggagtcttaacctctaatgcttgatgaagttctcgaccgctgattgcgatttctccattttctttttcttgtatgttgaacatttcgcctatgttcgattttgtttgtaatgcttgcatattgtttgtgctcctttctgctatactcctattaaggaggtgaatgacttatgactgatgaagctaaatttgtccttttacaactttattcaatttaccttggtagaattgacgaaggtatgtctaaacattctgcatcttatttcggtagtgatgaatcctcatttaacgctttctttttaggttttaattttgaagactatatcgatgcagttcttgaattaaagcatagagattttgtaattgcttctgctgaagatggcggttttcttgagatggctctttctcgagaaggtatcgcctactcagaatcagaatccaaaaaagattacaaaacacttatgggtttaattagagatttgaaaaaattaataatctaaaatccaatcatctgctattaaatcgtctgcgctaggctgccaccttccggcggcggtttgtctttttttcttatagtgtctagatacgactaggcattgataacgctgcaaattagttggtaatatcccatacacatcttgattctctctccttatacttattcctttctccatcgctagcttcgttgcttcttgaatgttcatttgttattcctcctattaagatgtttgtttttctttaaatgctaaaataattgatttctttttatcgttcgtaaatacgaaattttcgtattcattacctaaaaaaatatcatcatatttaacattaaaagcactcatatacttagaaagtaaactatctttaatgtttgtagagtctttttccatattttgaattgtacgtgatgagaccttaaataaatctcctaactctttttgagtcaatccgtaatcagtcctcaactcttttaatgttttcatgttgtcaccgcctttcgtaaacctaatataatacgaaattttcgtattgtcaacattaaatacgtttttttcgtaaaaaactttactatgatatgaaaatttcgtataataagaaaaaaaggaggtaagtaatatgaacaaagaaagaaatattattatagccaaaaacattagaaaatttctcaacgattcaaatatgtctcaaaagaaacttgctgaactcattaacataaaaccatctactttaagcgattatttaaatttacgttccaacccctctcacggcgttatacaaaggatagctgatgttttcgaggttggtaaaagcgacatagatactacatacaaagacgataacgacatcacttccatatacaacaaactcacacctccccgccaagaaaacgtacttaactatgcaaatgaacaattggaagaacagaattctaaaggagataacgttgtagatattaattcatataaacaggagaaaactccagttaacgtcaatggttgcgtctctgctggtgtaggagaacgtttacacgatgaaacgctatttactgaaatggttaaaggacctatccccacacacgatttagcgttaaaagtaaatggtgattctatggaacctatgtttaaagatggcgaaatcatatttgtggagaaaactcacaatataaagaatggacaaattggtatattcatcattgaagaagaagcgtatgttaagaaagtctttgttgaagatgatagattgactctagtttcactaaataaagattacgacgatctacacttttatagaaatgaaagtgtgaggttaattggaaaagttattttataaaaggagcacttgcaaatgaaaaaatatgatattgcagtcttagactttgaaactatgaatgaacatatgaacagcccttgcgaagttgctgtatctttaattaaggatttatcaatagtaaaagtttattcatcttatattaatcctcctaataatagatataacttgaaaaacgctaaaatacataaaatacctgaagatgtcatattaaaagcacctaaatatccagatatttaccaagaaattctctatcttttaaaagaatcacatttaattattgctcataatgcactttttgatatttcagtattaaaaaatactaataattattatgacttacctgttccaaacttcatgtatgtcgatagtataaatatctttagaagcttccacgcaatctctagttttaaattagaaaatttgtgtagcttatatgatatcgataaagaaaaattacattctgctaaatttgacgtgctagctttatcgaagatgttgatatcactcgctaaaaacaatcagcattatagtgtattaaaattaatacattatatgcctaagcaatacattagatttagcaaatattctaactctccaactaaacttttcgattcaggatttcaaaaaattcatatgaaaatatctgagattaataaaatagaagtggaaagtgtaatccctattttaaaagataaaaatgttgtttttacaggtaattttgacactgaaaaacaagatttaatgatattaactagaaagaaaggagcttatatcagaagtgacgtaactgcaaaaacagatattttagtcgaaggtgttcaagatgataaatataaagatgtgaacggactagtttcaaaacaacgaaaagctcgagaatatgttggaaatggtgcaaaaattcaatttttaaatgaagaagacttaataaatttaataaaggaataataacgatgatcaaaaaaatttttacaaaaaaacatgtattcttagttatagaagatgaaaaccataatcacagcgatgctgtttttggaaaaagtatattactttcaatttacgtcggtgtgaataaaaagactaattctaaatcagggaaatttatataccttgacagatctaaaagaatcgttagacaatctgatatcaccaaaatagaatcagctaacgaaaatgatgtagatttttataatttactgaagaaagaaaaggaaattgtttattccaaaaatatagtagataaatacaatttagcgaactatataatttactacgaagttagtactaaagaataaaccaatccattatttcataatactaaccttaaatttacagaggttttaattatgaaacatgaaaaaagcaatcttaactttaagtcttatatttattacctactacctcacttttaaatatatgtggattaaagaattgaagtattaatcatgcttatttgaaaaagacgtctatttcagcagtgtttgaaaggaagtttataatgaaaataaaaaattgcaaaataaaaaaagaaactatagtatatgaagttttaactagtggtaatcaaccattcacttatgagttacctaaagatttatcgtcacataatgcgcgtaaatacttggaatttatttcacaaaaattagatggcgataagttaaccaaagaagattcattatgattttactaaacaaaaaaacgcctactagtgtgaaaacgtattgattaatagcgcctatgtggcgctttaatatataaagtaagcaaaggagaaatgaaaatgaaaaaagtaagtgttataatgccaacattcaataacggcgaaaaattacatagaaccattagttctgtattaaatcaaacaatgaagagtactgattacgaattaattattattgatgatcattcaaatgacaatggtgagactttgaatgttataaaaaaatataaaggattagttcgttttaaacaattaaaaaagaatagtggaaatgctagcgtacctagaaatacaggcttaaaaatgagcaaagctgaatatgtattctttttagattctgatgatttacttcacgaaagagcactagaagatttatataattacggcaaagaaaataatagcgatttaataattggaaaatatggagttgaaggtaaaggaagaagtgttcctaaagctatatttgagaaaggaaatgtagcgaaagctgatattattgataatagtattttttatgctttatcagtactaaaaatgtttaaaaaaagtgttatagataaaaacaagataaaattcaaaacattctctaaaactgctgaagaccaattatttactatagaatttttgatgaattcgaaaaattactcgataaaaaccgactatgaatactatattgtagtcaacgatttcgagtctagcaatcatttgtcagtaaataaaagtacaggaaatcaatattttgctactataaacgaaatttataaagctatttataaaagtccaatttataaaaaccaagaaaaaagacaccaacttgccgggaagtatacaactagacttttaagacacggtcagaaaaagaattttgcaaatagtaaaatgaaatatgaagataaaatcgaatggttaaacaacttttctaaaacaattaataaagtacctagagactcagataaatatgtcacacaaatattcaacttaaaattagaagcaataagacaaaacgatttattagctgtgatgattgcagataagctattataggaggaaaacaatggaaaactttaattataataacataaaaaaacttgttcttgaaaatgttgatatagataaagtaaaagaagtatacaaagattatgaattacttaattatacaataaaaaaccaaacactttacatgaacgattatgaagttgctaaagtttctgaaaaacatctaaacgaaaatattaataatctaagaggcacggttaatctagacgaaaaatgtattttgtcactaacctatctataatgcgaaatttcgggtagctcgcctacccttattattttttgccaattttgaggagggaacacatgaaaacacgttgttacgatggtaaaaaatggcaatatgagtttaagcatgaaggaaaaagataccgtaagaaaggttttagaacaaagcgtgaagctaattctgctggactagacaagttaaatgagttaagaagtggttttaatatagataactatataactcttgaagaatacttcgaaaattggattaaaacgtataaacaacctgttgttaaagaaaatacctaccgtcattatagaaatgcattacaacatatacaaaaacataaaataggtaaaatggagttatcaaagataaatagacaagtttatcagaaattcataaacgaccattcaaaagaacacgcaaaagaaactataagaaaaacaaacggtgctattcggtcagctttagatgacgcattatatgatggacttatttttaaaaaccccgcttataaagttaattataaagccggaaaacctacgaagtcagaacaagaaaaattcatctcggtaactgaatatgaaatactaaaagatcacgtcagaaagaagagaactcgttcatcattagcgctattcataatgatttgtacgggttgtcgtgtcagtggtgcaagaaatataaagattgagcatatcaaccaagtgaaaaacactatatttattgacgagcgaaaaaccgatacttcccctagatatatcagtatcgctaaatctgatatgaaacacattatggacgtcataagtacatttgcaattagctatgatggttacattttcaaagaagccggatctataattaaccttcaggctatcaataatgctttgaaatcagcctgtagagtcaataatataccaattattacatcgcacgcattaagacacactcattgttcttatttactagcaaaaggtgtatctatacattacatttctaaaagattaggtcataaaaatatagcaataactacatccgtgtattctcatttgttagaagaaaaatttaatgaagaggacaaaaaaacaactaaaattttagaaagtatgtaatttagggacccattagggactccaaacccaataaatactgttgttacaaggtttctatgtatccaaactggggacaatataaacgcgctgatttaatcggacaatcttcttatattaaaaataatgatgtcgtaatattcaatgaagcatttgataatggtgcatcagacaaattattaagtaatgtgaaaaaagaatatccttaccaaacacctgtactcggtcgttctcaatcaggttgggacaaaactgaaggtagctactcatcaactgttgctgaagatggtggcgtagcgattgtaagtaaatatcctattaaagaaaaaatccagcatgttttcaaaagcggttgtggattcgataatgatagcaacaaaggctttgtttatacaaaaatagagaaaaatggtaagaacattcacgttatcggtacacatacacaatctgaagattcacgttgtggtgctggacatgatcgaaaaattagagctgaacaaatgaaagaaatcagtgactttgttaaaaagaaaaatatccctaaagatgaaacggtatatataggtggcgaccttaatgttaataaaggcactccagagttcaaagatatgcttaaaaacttgaatgtaaatgatgttctatatgcaggtcataatagcacatgggaccctcaatcaaattcaattgcgaaatataattaccctaatggtaaaccagaacatttagactatatatttacagataaagatcataaacaaccaaaacaattagtcaatgaagttgtgactgaaaaacctaagccatgggatgtatatgcgttcccatattactacgtttacaatgatttttcagatcattacccaatcaaagcctatagtaaatagtgctcaactaactaataactcgcttcgttctaaaaggacgaagcgagttatattgttaaaatttgaattgacttacattttaataaaatcatcttaacaactttaatttttcattaatacaagtctttactctacactcaaacaagattcatacactgcacatcataataaatctatctactcaaatataaataaaagttacctactacattctatgtagcaggcaacttttattacttatttcttttcattatcattaagtacttttacaaacttcacatcatgtgtcttccaatcaacttcatataatgctgataatttttcttcttttttatctacatggttttcaccagaccaatagccccagaaaccatggcgattccaatctattttaaactcatccattgatcttttataatgaacaacaaattgtgatttacctttgtcttttttatcatgtgacataacagctaaaaattctggattaaacccttcagacacagttacaggcattttgtctttaggtgtgaaattatctttcgcccataaatttccatttcgtgttaaagaaaagatttcacttttagttctattatcactatcattagttaattgtctcgtatggtcatgtcccatattatttatcaaatgtgcttctactttccaacctacacctttatgtgacgtagattgatcaagtaatgtacgatatgatggttgttgataactaatcgtctctgaataattactctcttttgtaatatttccagttaagcctccacgattaatcgaaaaatctccacctgttttataaccatacgtatatttaacttctcttgattcatcctgattttttggtgcaaagtcagtcacatttgtattgttgttgtcatcaacattttgaattgaaactgaataagatccaggccatcttaatgtactattccaataaccatttgggtctaaaattctcaaaccactaccaattgtaccttttgctttaataaatactgtttctttatcataattaggttcagttaagaaattaaattgtaagctttgagtaatatttttttgactatcacttgttgtagctgtacgtgtatacattttagtatcaccatcaagattcttctcagaaacagctttaatttcagaattaatttttgcataagaagttgccggaaatacagttaatgcagtagatattgctaaactacaaattgtgatgtttttgtataattgtttaatcattagtaatccgccctttcaatattatccttctttataaggtttattgtcatcagaatatttatcaacgactttaactgttttatttttccaatcaacttcataagtgacaattaacctttgaccatctttatttttttctaaaattggaggtgcataatgtattccaggtctgtttttcaaaatatcttgatttcgtgtgtatgttacttcaaattgcgttttctcatttgacttttcattagataaataagttaaaaattctggattaaagccacttcttactaatgctgggtatctatattttgaagcaaagcttagttcagggttttctacagtagcaattctcgtatttctatagaataataattcatcatttctatttttcacttctccaccatacttcaagtcattcgcaataactgaccagtgtacatgccagttattatttttaccgctggcaattgtgtcataattttgctgattataactaatcgttttggagtagctatttgatgaagttcgtccaatacctttcgttgaatcgaatttaccacctgagctatatgaaaatgtactgtctactttcgcagttgaaattttatttttcggcaattggtctaatatttcagttttacgatttctttttacttgaaaatctacatggtactcacttggatactttaaccaatttgaatttttttcttctttatgagattcaaactttaaatttgaatgaattgagccttgttttttaacaagtaatacattcttgtcataagttggatcatcgataaagtcgaattgtaaattttggagtatatttgttttctcatcatatactgtttcagttcgttttgtgattttaccgtttttcccaatatcatcaggtactgttgaatttttatctttattagtaacattacgtttgtctttttgttgagacttatcaacatgttctttcttattttgatcttgcgagtctttatgagctgaatttgcttgagtcgttgctgctgataacaataaaattgcacatgataatgatgacgctattaaaacacgttttttatttttcattgttataaccttctttcgtatgattgatatttgttgatatgtatcgacatgtgaataatatcacaaaaatagagaatatatatttaactatttattaaatgattttgttaatattattaaatactttattctctttaaaaataatgtgtgtacaaagtcattaatttagcaaatatttttatttagtagttaataaccatcgatttgaaatttatatataattattagctaaataatatcctgcatctttctcatacaatttactataaaattaagcatacccgatatcagtgttaataagatcgttgatactagacagttaatttcatagaacgaaatcaaataacacgctactttctgcattttaaattatgtttaagaataaaaattatgtttatataaatatatatactactttgaaaaggtgtgagcttaatgacaacttttagtgaaaaagaaaaaattcaattactagcagatattgttgaactacaaactgaaaataataatgaaatagacgtttgtaattatttaaaagatttattcgacaagtacgatattaaatctgaaattttgaaagttaatgaacaccgcgccaatatcgttgcagaaatcggtaacggctcacctatactcgcattgagtggtcatatggatgttgttgatgcaggaaatcaagataattggacttatcccccttttcaactcacagaaaaagctggcaaattatacggtcgaggcacaacggatatgaaaggcggtctgatggctttggtcatcacactcattgaattaaaagaacaaaatcaattgcctcaaggaacgataagattactagctactgctggcgaagagaaagaacaagaaggtgccaaattattggctgataaaggctatttagacgatgtagatggcttaattattgctgaaccaactggatctggaatttattatgcacataaagggtctatgtcatgtaaagtaactgcaactggcaaagctgtccatagctcagttccatttattggtgacaatgcaattgatacactgcttgaattttataatcaatttaaagaaaaatattcagagcttaaaaaacatgatactaaacatgaattagatgttgcacccatgttcaaatcattgataggaaaagaaatttctgaagaggatgcaaattatgcatctggtcttacagctgtatgttcgattataaatggcggcaaacaatttaactctgtaccagatgaagcttcacttgaatttaacgtaagaccagttcctgagtatgataacgactttatagaatcgtttttccaaaatatcattaatgatgtggatagcaataagctttcactcgatattccaagcaatcaccgacctgtaacaagcgataaaaatagcaaattaattactacgattaaagatgtagcttctagttatgtagaacaagacgaaatatttgtttcagcgcttgtaggtgcaacagatgcctctagtttcttaggagataataaggacaatgttgatttagccatttttggaccaggtaatccattaatggcacatcaaatcgatgaatatattgaaaaagatatgtacctgaaatatattgatatttttaaagaggcttccattcaatatttaaaagagaaataagaacgatgctgtcagctgccctattcgcgtgctggcagttttttattgcgaattttaagttgatagaaatagcgatgaatattgtttgactgtaaatattcaaatatcaacaagcacattttcattgattaagtgatgtaaaactgaaattatggtggtgatttgtcatacatatattgcattgtctattgaaattgggaatccaatttctctttgttgaggcccccaccccaacttacattgtttgtagaatttcttttcgaaattctctgtgttggggcccccaccccaacttgcattgtctgttgaaattgggaatccaatttctctgtgttggggcccctgactagaattgaaaagtaatacacatcagtaacatttctattttcatttatgatattatctaattattaatttataatataaaggagtatgcaattaaaatgaacaaagtccacaaacctttatatttttatttaatgcttttcttctctacaactatcataggtgctcttttattatatttacctttcactggtaaaaagccaatatcttttttagatgccctatttatagcttcaagtgcatttacagttactggcctatccccagttgatataggatcacagtttaatatacttggtgaaatagtaatactattattaattcaaataggtggtctgggtatcgtgaccgtaaccctattgacactagtatttttaaatagaaagatatcaatgaaaaatagattcttgattatggttacatggaatattgacgaacctggtggtgttattaagctaattaaacacttggctatttatagtttagtcactgaattaattggtatgatttgtttgtgtttatcttttataccaaaatttggtataggcaaaggtttatttttaagcttattcacatcagtatcagcttttaataatgctggatttgccctttttaagaataacttaatagattattctagtgatccaattgtcattattacaatctcaatactcataatatttggaggtattggacattttgtcgtaatagactttattaattgtaaaaaattgagtaaattatctttacattctaaattagtcttaactacaactagtatcctaataattataggagctattacattctttttattagaacagtttaatactatgcaacatatgggactagttgaaaaaatcggaaattcttttttccaatcagtaacaacacgaacagcgggttttaacagtattgatatagcaagcattaacaaatctaccgccttaatgttaatgttacttatgtttattggtggtgcccctctcagtgcagctggaggaattaaaataactacttttgcagtggcgtttatatttgttttaaattatatacgtaaagaaaataatgtttcagtattcaataaagaaatatctgacaaacatataaaactatctattgttaccattaatatctcatttctatttatcagtatcattacttttatattatcgataattaatccgaacatatcattaatcaagttattattcgaagtggtttctgcattcggaacagtcgggttaagtatgaaccttaccacagaatatcatggtattactaaaataattattatattcgttatgctttgcggtaaagtaggactattaactttattaagaacatttataccaccaaaaagtcctaaaaattaccgctacactaaaggacaaatttatctataaaataactatccatctttaacaagaaatgaactagtgttttaatctattacatttaaaaaactacctaaacaggtagttttttgttttttatttattttaggcccattaaatgtcttatctctttaattaagtaaaatgcacaagtacacctttaaaaagatttactcaaaactaaactatacctagttaaccgcttgtgattaagaaattttaaatgtggtttcttttaattatgtcaaccacccataaggattttaatcaagcactcattcattcctgcactcgcaatatgcattacttatagaagtggatgcactctcatattatggcaataccataactcccgcaccataatgatttaaataccattatgaatctcaattacaaattagcacataaaaaagacgcctctcataagtttagtcaactaatggaaggtgtcttaaattaaaatattttcatacgctctaatatttatttggaacgaatcatactcgtctatcatggaatgttctagttagtcaaaactagaaactgttttacatcattcccggcatgccacccatgttaggttggtcattatttttttctggaattgatgctacaaccgcttcagtcgttaagaacattgctgcaacacttgcagcatgttgtaatgctgagcgtgttactttagttggatcaacgatacctgcttctaacatattaacccactcgtttgtagcagcgttaaaaccaacacccggctctgcgtttttcaaacgttctacaataacagaaccttctaatcctgcattttcagcaatttgacgaactggtgcagttagtgctttaagtacaatatttacacctgtttcaatgtcaccttctgcttcaatttcacttactttttggtaaacatttactaatgcagtaccaccacctgcaacaataccttcttcaactgctgcacgtgtagaatttaatgcatcttcaatacgtaatttacgttctttaagctctgtttcacttgctgcacctactttaataactgcaacaccacctgctaatttagctaagcgctcttgtaatttttcacgatcaaagtcagattcagtttcttcaatttgagatttcaattggcttacacgtgcatcaatgctgttttcgtcaccgtcaccatcaacaacagtggtattatctttagttacttctactttacttgcagtacctaacatatcaattgatgcatcttttaaatctaagcctaaatcatcagtaatcacttgcgcaccagttaaaatagctaaatcttctaacattgctttacgacgatcaccgaaaccaggcgcctttactgcaacagctgtaaatgtgccacgcattcggtttagcacgatatttgttaatgcatcgccttcaacttcatcagctacaattaagattggacgattagattgaaccacttgttctaataaaggtaagatatcttggaaagacgagattttcttatctgttactaaaatgtatgggcgttctaattcagcaaccattttatctgaatcagtaaccatatatggtgattgataaccacgatcaaattgcataccttcaaccacttctagttcagtgtttagtccatttgattcttcaattgtaatgacaccatcgttacctactttttccatagcttcagaaatataacgtccaatttcttcatctgctgctgaaatcgcacctacttgcgctatttcatttttattttcaactttttgagaattttcatgtaatgcttctacagcaactttaactgctttgtcgataccttgacgtaaaccaactgggttcgcaccacttgtaacatttttcaagccttcttgaatcattgcttgagctaatactgttgcagttgtcgtaccgtcaccagcaatttcatttgtcttatttgcaacttctcgaactagtttagcccccatattttcatatggatcttctaattcgatttctttagcaatcgttacaccatcgttcgtaattaaaggtgctgtaaactctttatctaatacaacattacgtcctttaggaccaatcgttactttaactgcatttgctaattggtctacaccacgtaacattgcttgacgtgcatcttcagagaatttcaattgtttaaccataaatgataaacctccatttgtttagtcatatttcattttcgttctttacaatttatctatgaatttaattttatattattcaattaccgctaaaatatcttcttcatttaatactagatatgtttcattatctcgtttaacttctgtaccagcatattgttggaacacgacacggtccccttctttcacttcaggagtcactcttgtaccatcatttaatagacgtccagttcctactgcaacgataacgccttcgtttgatttttctttagcactatcagttaaaacaataccacttttagttgtttgttcttgttcttttttctcaataatcacacgatttccaattggttttagcatgattgttcctccttaaaaaacctaaagtttagcacttaacattaaagagtgctaacatacatttataataatcaaatttggtcaaaatttcaagtcataaccttttaattaagttttgtaacttcaagttatttacgataaaataaattataaacaaatatttggaggaaaattatgacaagattatgggcatcattgctaactgttattatttatatattgtctcaatttttaccgcttctcattgtaaaaaaattaccatttgtacaatatagtggcatagaactgactaaagcagtcatttacatacaacttgttctatttttaatcgccgccacgacgattattttaattaatttaaaaattaaaaatccaacaaaattagaattagaagttaaagaacctaaaaaatatatcattccatgggcattgcttggatttgcattggtaatgatttatcaaatggtagtgagcattgtattaacgcaaatttatggtggacaacaagtaagtcctaatacagaaaagctaattattattgctcgaaaaatacctatatttatcttctttgtatctattatcggtcctttattagaagaatacgtattcagaaaagtaatctttggagaattatttaatgcgattaaaggtaatcgtatcgtagcatttattattgctacaacagtaagttcattaatatttgcattagcacataatgatttcaaatttattccagtttattttggtatgggcgtcattttttcattagcatatgtatggacaaaacggcttgctgttccaattattatccatatgttacaaaacggatttgtcgttatattccaattacttaatcctgaagctttgaaaaaagccacggaacaagcgaattttatatatcacatttttattccataatataaaaaacgaatcacacacggattatcgtcgctgtgattcgtttttatttttctttttatttcgctttacaaataagaatagcatgattgaaaataccaccatcatagaacatacaattgctagccaacttttactatatgcagttgacgcacttttcttattatcttcttgttttttaactactgtaaaatcgtctttttcatgcggttcaaatgagcgttgttttgaatccggcttatcttcgggctttttcaaatctggcattgatccaatttcaccagtaattaatgcgagtacttgttcatctaaattacgatagtacctttctgatttcaatggattgaaatattggaatctaaagtaattcgattgctgttgtaatccatttaaatatgcatttccgctgaaattttgttttcgaataatattataaatgtcttcatcagtaacttctccataatctttgcccaacttattaatttgatttaaaatatacggattatacttgtaagccccatttgccaaggctaaaaatcgttgggatacaaaatcattaccagtaggattttgtgagtttccttgattcccatttggttgccattgaccttgattagatccatctgaagcatttgggttccatgttcccccatttttcgagccaccagaatgatttgaatccccaggttgatcgggatctggtgacgggttaggatttggcttattagggtctggttttggattcggatttggctttggtttatctggatctggttttggatccggatttggctttggtttatctgggtctggttttggatctggttttggtttcgggttatctggatctggttttggatccagatttggctttggtttatctgggtctggttttggatccggttttggtttcgggttatctggatctggttttggattcggacttgggttttggttatttgggtctggttttgaatctgtacttgggttttggttgtttgagtctggcttcacattattcgaatcaggattagcatcacgactattcgaacctgttccttcattacccgtttgatttgattcgtgaggtgtcccagtctcattattattcatttcactatttactgatggtgaagttatattatgattcaaattagtagttggtttttctccatttaagttatcctttgcttcaactgtgtgcgttgcaagccctaaactactactacttaaaattaaaatacttgttgaaagtaacattttcttaaaccaatgatatgacatttcacgagacacctccctttttcatgtaagtattaatctaagtataataaatatgcgttgaaaatgcatttatatttggaatttgaaaatgaatattaatattcttgaaattttcgtaaatattactttacaagtccgagtataaattttatacttagtctattaagtattctttactaaagaaggagcaataattatgggcttatttaaaaaagataaaaaagcaatgacttttgacaatgcaatggaagaaagacgttcaatatataatttgaaagattcgatatcaattagcgatgacgaattagaatcaatgattgcacatgcagttaaacatgttccttcatcatttaattctcaatcaactagaattgttctcttgttaaatgacaacaataataaattttgggataacacaaaagcaattttaaaagaagtcatgggagagaatcgtgatttcgagccaactgaacaaaaaattgataacttcaaacattcatacggtacaattttgttttatgaagatcaagatgttgtaagtggtttacaagaacaaatgccaaactactatgataattttgcaatatggtcaactcaaacaaatgccatgcatcaatttgcaatttggactgcattagctactaaaggcataggtgcttcattacaacactataatccacttgtcgatgagatgacttcaaaagaatttaatattcctaaaagttggaaacttattgctcaaatgccatttggtgatattcgtgaagctgctggcgaaaaaacatttaatccagtggaagatcgtttcgtaataaaaaaataatcaatatattgttaagaatgggacagaaatgataaagaatcattagttattcattatgtagtagttcttacacattagccgctgctaatgtgcacttaagaataggaatacatgagtaaaactcatgtataagaaatactaatttctaaagaaaaagtatttctttatgttagagcccaccccaacttgcattgtctgtagaaattggtgttccaatttctctatgttggggccccatcaactactgtcaatataacattgtagagcctaggactttgattttatgtcttgggctcgttttttgcgtttcaacataacttttagtaagttatatataagatctatcaaggatgcgatgttatgaaagtccaaatttatcaattaccgattatttttggagatagttctaaaaatgaaactcaaataacgcaatggttcgaaaaaaatatgaatgctgaagtagatgtagtcgttttacctgaaatgtggaataatggctatgatttagagcatttaaatgaaaaagcagataataatctaggacaaagtttttcatttattaaacatttagctgaaaaatataaagtcgatatcgtagctgggtcagtttctaacattagaaactatcaaatatttaatacagcttttagtgtgaataaaagtggccagctgattaatgaatacgacaaagttcatttagttcctatgttaagagagcatgaatttttaaccgctggcgaaaacgtagctgaaccctttcaattgtctgacggtacttatgtgacccaacttatctgttatgatttacgttttccagaattattaagatatcctgctcgtagtggtgctaaaattgcattttatgtggcgcaatggcctatgtcacgtcttcaacattggcattcattactaaaggcacgtgcaattgaaaataatatgtttgtcattggaactaatagcactggattcgatggtaacacagaatatgctggtcattcgatagttataaacccaaatggagatttagttggagaattaaatgaatccgcagatattttgactgtagatttaaacttaaatgaagtagaacagcaacgcgaaaatatacctgtatttaaaagtattaaattagatttgtataaataagaagcgcccgaaataatatttaacacatgtcatgactaaacatagatttatgagagatttttcataagtctatgtttatttttttataatagataactcagtaagaatccatttcgccctttgcaaatgaatgattttcttaattaaattgattaattttttgaccttttccaacattagacttattcatatattttaacggtgggtctcataatgaggattaactctccccttctttattacaataaaaaaggccgcgagcttgggaggggctcacgaccatacttattattaagggaatgttttacagttattttttcaatctatttttggggatgttattaattatgaaaaaaattttatttatcaaataatgataaatcgatgttgtttacgatagcttacatgctagaaataattatctgtaatgataattaagaaaaatacatagcactgagtccaaggaaactaactctactagcaaatgttactcacttgctaattttacatggttattaagttgggatggcttaataactcatacttttagtactatacgaagataacaaatttacaatgaaagtaattaattattcatcttattttttagtgaatttgttcactgtgtcgataatccattttactaagtcaccgattgttgaaatgatatcttgtgccattgaaatcactccttccttaattaagataaaaattcttaaaattaaacaactcatcaactattttccatcacatctctgtgatctagttatattaaaacatgctaaaagcatttattttccaatttttcttaactagtcgttttttattcttaactgtaaatttttttatgttaaaatattaaatacaaattacatttaacagttaagtatttatttcctacagttaggcaatataatgataaaagattgtactaaatcgtataataacagtaaggagagtggtgtaaaattgaattattttgataacaaaattgaccagtttgccacgtatcttcaaaagagaaataacttagatcatattcaatttttgcaagtacgtttagggatgcaaattatagttggtaatttttttaaaatacttgtaacatatagtatttctatattcttaagtgtatttttgtttaccttagttacacacttatcctatatgttaatacgctataatgcacatggtgctcatgcaaagtcttcgatactttgttacatacaaagtattttaacatttgtatttgtaccttattttctaattaatatagacattaattttacttatttactggccttatctattataggattgatttccgttgttatttatgcacctgcagcaacgaaaaagcaacctataccaataaaattagtaaaacgtaaaaagtatttatctataattatgtatttattagttttgattctatccttaataatacatccattttatgctcaatttatgttattaggaattttagtggaatctattacattattacctatttttttccctaaggaggattaatcatgaatacacttgttaatatgttttttgattttataattaaattagctaaagcaatcggaattgtcggtggcgtaaacgcttgcagcagtttatttgatgaacctaaagtacccgctgaattaacgaatttatacgacaaatagtaaaagttattttagaaagtgtgtagcatatggaaacaataaacaacttagctatggccacttttcaattagtaatactttttacagtagccaaattcatttcctttgttaaatttaatttaagggattattttattatagttggaattataattccaaccatgtttttgtattacttctatggaagtagagccgtattgattccaactttttcatctatcatatttttattctttaaattaaagtactatgcaatagtaacaattttagtgaccatgatcataatgtatttgagtaattttgcaacagtaggtttgtttttaactttaagaaaatacactactgatcctgcaatactcttaccattatatatactttctttttcatcagtttcattattagcgacatatttggtaagaatatctctaaagaaatttaaaaaatcatacttatctttaaataaaacttatatgattataatttcattcgtattatttgcaacatttgcatttttttatatttattctacaaatacaagttcaaacggtgatagcttaattccatatgcacttgtatttataggattaataatttttatctctgttgtaatacttataatgtcgcttttcacccttaaagagatggaatacaaacgaaatcaagaagaaattgagacctattacgaatacacattaaagattgaagcaattaataatgaaatgcgcaagttccgtcatgattatgtcaatatcttaacgacactttcagaatacattcgcgaagatgacatgattggtctacgcgcttatttcaataaaaatattgtacctatgaaagataatttgcagatgaatgctattaaattaaatggtatcgagaatcttaaagtacgtgagataaaaggcttaattactgcgaaaattttacgtgcacaagaaatgaatattccaattagtatcgaaatacccgatgaagtaagtagcattaacttgaatatgatcgatttaagtcgcagtattggtattattcttgataatgcaattgaggcatcaactgaaattgatgaccctatcattcgcgttgcatttattgaaagtgaaaattcagtaacgtttattgttatgaataaatgcgctgatgatataccacgcattcatgaattgttccaagaaagtttttctactaaaggtgaaggtcgtggtttaggtctatcaactttaaaagaaattgctgataatgcagacaatgtcttattagatacaattatcgaaaatggtttctttattcaaaaagttgaaattattaacaactagccataaggatgtgaatgtatgaaaattttcatttgcgaagacgatccaaaacaaagagaaaacatggttaccattattaaaaattatataatgatagaagaaaagcctatggaaattgccctcgcaactgataatccttatgaggtgcttgagcaagctaaaaatatgaatgacataggctgttactttttagatattcaactttcaactgatattaatggtatcaaattaggcagtgaaattcgtaagcatgacccagttggtaacattattttcgttacgagtcacagtgaacttacctatttaacatttgtctacaaagttgcagcgatggattttatttttaaagatgatccagcagaattaagaactcgaattatagattgtttagaaactgcacatacacgcttacaattgttgtctaaagataatagcgttgaaacgattgaattaaaacgtggcagtaattcagtgtatgttcaatatgatgatattatgttttttgaatcatcaacaaaatctcacagactcattgcccatttagataaccgtcaaattgaattttatggtaatttaaaagaactgagtcaattagatgatcgtttctttagatgtcataatagctttgtcgtcaatcgccataatattgaatctatagattcgaaagagcgaattgtctattttaaaaataaagaacactgctatgcatcggtgagaaacgttaaaaaaatataataagataataaagtcagttaacggcgtattcaattgtaaatcttgttggattttaacaagataactagcaaatgcactgtatagctggctttttaattgtttaataacaaaattaaatatgacgcgtgaattaaaaaatgatgtaacgtttctttgtatacctattcctattactacataatttatcaatttctatttcactctacaatcctatggcgcaatttttaacaaaatatactaaatttgaaattgacagtttccataaataaaatgctacaatttcctaccccgtgaatcttattttgttttaaaaaacagtgtagcacaagattcaacttgtttcctacactgttttataaatgaattatttaaaatgcttgttcaacctcttgtaatgttggcaaactattaatggcaccatacttcgttgtcactattgcagcaacgcgattgctaaacgctaaaatttcctcaccttcattttcaaataactgagttaaatttaacacatcggttgctaaaatcctgctaataactgcaccaataaaagcatcccctgccccagttgtatcaacaggttttaccttatagccactatgataatgattaataccatttttcaaatatacggcagcaccatctgctcccttcgtataaatgactacagtaacattacctgtaaataatgattgaatggcttcattttcatcatgaatacctgtaataaattctaattcttcatctgaaacttttacaatatgcgccaatggcaaaaaggtatgaatagtttgtcttaaatcttcagcgttatcccataatggcaatcttacattaggatcaaatacgacagtaccatttgcatttaatgttttggtaatcaattgataatgtgcatctctcatcggactatcgaccaaatcaacagaacaaaaatgtactacatcattttcattcacatcaatatcattcacaaaacttggttcaaataacatatcagcagagggcttacgataaaaagaaaaatctcgctcgcccgcttcagtcaaactcacaaaagctaacgcagtgtttgcttcattcgtgcgatacacttttgatacatctacaccaatacttgatatcgtttcaataatgctatctccaaatgcatcattacctaattgtgtaatcatatacgcttgttgtcctaacttttgaactgtacaagctacattgcatggcgcgccaccaatttgcttcgtaaatgtttgaacatcttttaaattcgcatttgtaacatttggaataaaatcaattaacgcttctcctattgaaaatagacgtctcatttatgttcatcctttaaatcatatttagtaaattgtaaatatacttgccctgattctgttgatgttttaatacctagtgcgtcttctgtcgggaaaattcgagatgtcaaaacacgttccccatcattacagaaaatttctatactagatgtatcaacaaaaatttgtaattgctttaatggcgtgtctaatatcgtactacgcgtcgtaccttcaacatttgtcggcaataaaccactgtcgctgcgatctaatgttattttattttcacgcttgttataagcaattaatgttgaagaagtcttagatgtacgtaattcaaagtacacttcggtagcatcattatccaaaatatctatgattaattcatactgtttaccttcatacggatgtaattttcgagtaaatttatttgcgtagcctaatgctgtctctttattgtgacgtaatttttccaacgctggatatggacgttgcttaagttgaccattttctacatttaatacacgaggaattgttaagcaatgggcccatccttcattatcagtaggatattcgatttccggtaaccccatccatccaattagtactcgtcggcctttttcatctaaaaatgtttgaggtgcatagaaatcaaagccattatcaagctcgacaaaattttcatgttcatatgttaacttttcaatatcaaactttccaagtatataaccactttgataaatatttttgaactgattgccttttggttcaataccttgtggacaaataagtatgacatcttgattatctaaattaaagtaatctgggcattcccacatatatccaaaatcatctaactctgtatttatttcacctaaataatgccaattaattatatcttcagtattataaagtaataatcgaccttgctgatcattattttgtgcgccaatgattgcataatatttctcaccatatttaaaaactttaggatctctaaaatgacttgtatatccttctggttgctggctaattactggctttggaaacttttcaactgaaccgtcttctttcaatcgtgcgatcatctgactcgcatgtcgttgccaatgattatctcgatgatttcctgtgtacatataatataaatgcccgttatattcaaaagcgctaccgctataaacaccatggctgtcatatttagtatctggatttaatattggcccttcaggtttaaagtttattaagtcatcactcgtgtagttataccaatactttaagccatgtactgcgcctaatgggaaccattgatgtgaaacataatacttccctttataaaaaataagtccgttgggatcatttaataaacctgtttctggttgtatatgaaattgttgacgaaattttgattgatcaacttgttgttttaatgttttaaaatactcagtatcaacgtcctcgattcgttgataacgttcttctctagtccattcggtcataatatttacccagtcctccttttataatttatgctgttaacaatttatattctattatagcaaattttacctacgttctttaacttttaacctatccatttatagttatatggtatcggttccacatttgttttaaaaaatacagcgtctaaatattaacatctactgtgacgctatatggcatatcttgctttttaagcatctgttgtatctcttccatcgcgcattggccagcttcaaaataattataatgaattgtttttatcgatggagacactaattgtgtcattgggtcaccaccaaaaccatatatttgatgtggtttcataacatcatttttatcagaataatatttataggcagctaatgcaatcgtatcagttgctccaacaaccgcatctacttgctccacattttccaaaacatttgcaacatctttttgtgcttccacataagtaaaatttgtttcatgtatattaggtttaatttggtatttagctaactggtcaagtaaaccacgttttctatgtataccaactgcaatatctttttcacttacactaaacacttcaacttgttgatatccctgttgaccaatccattcgcctataatttgacctgctttataatcatcatgcacaatactatgaagttgttcatgttgttgaccaacaataacgattggtacattcattttattaatgacttcaatatgtctctctgttatgtctgtagccattaaaacaataccatctactttactgcgtgctaatgtttcaagcgcttgtatttctgcttcgatatttaaacctgtgtaatttaaaattaattgtgattcatatttttggcattgttttgccaatcctttgattgtttcatctactgcatatgaattcattctaggtataatggcaccaataaggtgtgtttgtctcgctcttaaactttgagcaaattgattcggttgatagtcatgttctgctataattcttgttaatttttcacttgtttttttactgacagatccattatttaaaaatctagatactgtgctttttgaaacgcctgccaatttggcaatatcagatatatttttcatacttattcacctatcattatttgtgacacttagccttattttagcatatgtgtaaccgctttaaataatatttctgcttctttcataaaaagatttcaaaataaaacttttgtataacaaaatgtcccaacatcaacctttagttaaatgtcaggacaatgaatattctatgtaaatatattctaatatcgaatatgtttattgaatctatttagctcaccttcaaagtaagcatgttcaccgtgaacaatcttgtctaatcctatattcgtttcttgttccgtaacagataatggtgtaattaatttaattactttcgcaataataaacgtcatgacgatactaaaaattacaactgctgttacacataatatttgtacaagtataatatgtatgtcaccagtataaataaagccattctcaatgtcaggattggcttttttactttggaaaactgctgttaaaacagcaccaataataccaccaacaccatgaataccaaatgcatctaatgcatcatgatattttagttttaccttgatgtaattaatgacaatataacaacagatacctcctattaaagccattattgttgcactaagatatgttacatatcctgctgcaggagtaataacaactaatcctgctaatgcaccgagtaaaagtccaagtaaacttgtcgtctttttaaaaatatattctaaaattaaccaacctatagcacctgcactggctgaaatgacagtatttgtaaatgcaagcatcgcaatattatcaaatgtaaaagcactacctacattaaatccataccaaccaatccacacgaatataccgccaatcaacgtaatgataagattatgtggtgttgattcagaatgtttgtttccttttccaatcataatagctaatactaaaccagaaacacctgatgtaatatgaacaaccgtacctccagcgaaatctaatacaccgagtttattaatccaaccgccgccccaaacccaatgtgctactggactgtatacaagagcagtccatattactacgaataataaataaggaataaacttcattttctcagcgattgaaccagataaaatagaaattgcaatcgtacaaaacatcatttgaaataacataaacaaagcgaaaggaatatgtgggctaatatcttcttgagtcgcaaaacctacatgattaagaaaagtatattcccaatttccgaaccataaattcccattcccaaaactaattgtaaaaccaactgttatccatacaaatgtaacaagcacaattgctgccatactttgcatgacagtattaagcgcatttttagattgaactaacccaccataaaataaacttaatcctggtgtcattaaccaaactaataatgtacacaaaaacataaatatcgtatcgttaagattcatacttaccactcccttgttttcataataatctgacaatttataaaaagcaaaaatgcgttaagttttattacatcttttgaaataaaatatgccacactatataaaaatgatttcatgaactaaaacaaaaaagactacttactcacttttaaattagcggaagtagccatagaatctaatatctattttattgttaaaatgataacgttaaactttttgaattgtaattgtccatgaagcattatcaatttgttcatagtttgttataggataaccattttctgcagcccaatttggaatggcttccgtcgcttgcgtgcaatcaaaatcaatttttaattcatctccagattgcaatgttgccattttcttttgcgcttcaattaacggaaatggacataccattcctactgtacctaattcgtgtatcataattatttctccttttccaatcacttttatttgatcaacatcatttgcataataatcttctatactatttgcgtttgctgtttaacctttgcggattgttgttgtacttttttcattggacgaacaaagataaaatgactcattgtccatacaccaactatcatcgatgctagcgcaatccatccttgccaagtcatcgttgccgtttcaaccaaaccgttaccgatagaacaaccaccagcaactgacgcaccaaatcccatacatatgccaccaatggcactgtttcgtattgtaatcttgtctggcaatcgccatttaaattctcttgatcctctagctgcaatatatgaaccaatgaaaattcctagaactaaaaagacaccccaatcaataaatttagtttcacctgtaatcaaaaagtgtactaaatttgctgaaggcgttgttatacctaaaccgtcatttcttccagttgatgcactcattggccaagctaagagtgcgataagtccaattacaattgctgcaataaatggatggtatcgtttttcgaaaaggtaatatctaatacctgtataacgttgctttagttttggaacagcaactcgaactttcttattattgagtgttcttacaactagaaaaatggtgattatagttaatataacgactaatccccaaaacggaatgccagttgtttgagacatatcactatttacattcgttggttgattaattttatccattactggctttaaaatccctgttttagtgattgctgcagtaacagcatataatactaatgcaatccaactaccaattagcccttcaccagcgcgataccaagtacctgttgcacaccctccagccaatactattccaattccaaaaataaaagaacctataattgttcccaatattggaaaactatgtgcaggaatttgtaaaatatctgttgccgtcaaaatcaataatcctatactttgaatagtaatagcgattaataatgcatagaacatcttattattcttttgcacatacatatctcgaaagccacctgttaaacaaaatcttgttctttgcatgacaaaacctaagagtcccccgacaattaagccactaaaaatcatccacataatcctaacccctcatttccgataagtttagtatgtattataggtgatgattttcttgttttcaaccttatacacaatatttttgatatttatattatattcatataaggaaggcgattaattacgattcatcattatatctctacgtgttaattcattaacctatactatatttatcaacacaacagtttttcctttcattttcaaacataacagaaaaagcctgagacatacttagtcccagactgttctataattaattaaagatataacaaggttaatcattcaaagctaacatcacatttattcactgtaatttttcataaagaataataatgactgtaattctatacctaagtcaatttgatgtacttgcacatctgaaggcgtattaattctaccaggagtgaagtttaaaatacctttcacaccagcttggacgagttcatctgcaactttctgtgcaactctttctggtgtagttagaatcacaacatctatttcttccttcttcaatgttgttattaattcatcgttatcttttacaataacgttccctattttctggccaataacatcttcttttacgtcaaacgcttctgtaatcgtcatatcgtcatgtattgaaaagttatatgtgagcaaagctttccctaggttcccaactccgacaattgcgattttgatcatgtcactctcgcttagttcagatttaaagaaatccaataaactatctatattatatccgtacccttttttacctaattcgccaaaatatgaaaagtcacgacgaattgttgccgagtcaatttgtaacgcatcgctaatcgcttttgaatttacacgatctatacctttagattttaatgaactgacaaatctataatataacggcaaacgttttaaagttgctcgaggaattttaacttggtcactcattcgctatttcctccttcgtgtttgaatgaattatatctatgtattcaaacgagttagagcgtaattgttagattattaaaaaacaaataattgattacaatgaatacctaaatattatacattattgaattttaaaaataaatatcttagtttcaagacggcgttttatactgtaaaatggttattaatgtaataattacgacttttttcataagttaataaaatttgagaaagacgaaaggtgaagatcgaatgatacttttacaactcaatcatatatcaaaatcgttcgatggtgaagatatatttactgatgttgattttgaagtaaaaactggtgaacgaattggtatcgtaggaagaaatggcgccggtaaatcaacattgatgaaaattatagctggtgtagaaaactatgattctggaaatgtgtcaaaaattaaaaacttaaaactaggttatttaactcaacaaatgactttaaattctaatgcaacagtttttgaagaaatgtcaaaaccatttgaacatattaaacgaatggaaagcttaatcaaagaagaaacagattggttatcaaaacatgcaaatgattacgatagtgatacatataaaacacatatgtcccgttatgaatctttatcgaatcaatttgaacaattagaaggatatcaatatgaaagtaaaattaaaacagtacttcacgggttaaattttagtgaagaagatttcaataaacctatcaatgattttagcggcggccaaaaaacacgtttatctttagctcaaatgctattaaacgaacctgatttattacttttagatgaacctactaaccacttagatttagaaacgacaaagtggcttgaagattatctacgttattttaaaggtgcaatcgtcatcatcagccatgatcgttactttttagataaaatagttactcaaatttatgatgtggctttaggtgatgtcaaacgctatgttggtaattacgaggaatttatacagcaacgggatttatattatcaaaaacgaatgcaagaatatgaaagtcaacaagcagaaataaaacgattagaaacttttgttgagaaaaatattacccgtgcttcaacaagtggaatggcaaaaagtagacgtaagattttagaaaaaatggaacgcattgataaaccaatgttagatgccaaaagtgcaaatattcaatttggctttgaccggaatacaggtaatgacgtcatgcatgtaaaaaatttagaaatcggttatcaaactgcaattaccaaacctatcagtatagaggtctctaaaggcgatcatatagcaatcattgggccaaatggtattggaaaatcgaccttaattaaaactattgctaatcaacaaaaagcgcttaatggcgatattactttcggcgcaaatttacaaattggttattatgatcaaaagcaagcagaatttaaatctagtaaaacgattttagattatgtgtgggatcaatatccgttaatgaatgaaaaagatattcgagcagttcttggacgtttcttatttgtacaagacgatgttaaaaagataattaatgatttatctggtggtgaaaaagcacgtttacaactagcactacttatgttgcaacgtgacaatgtacttattttagatgaacctaccaaccacctcgatatagattcaaaagaaatgttagagcaagcactccaacattttgaaggaacaatactatttgtttcccatgatcgttactttattaaccaattagcaaacaaggtatttgatttaacaattgatggcggaaagatgtatttaggagattatcaatattacattgaaaaagttgaggaagccgaagcgttgaaagcgcaccaagaagaacagtcagttaacgtacaagcacataaaaagtctatggaacaatcgtcgtatcataaccaaaaagaacaaagacgtgaacaacgcaaacttgaacgacaaatatccgagtgtgaaaatgaaatagaaactttagagactactatcttacaaatagacgagcaattaacccaaccagaagtgtataacaatccacaaaaagcaaacgaattagctatccaaaaacaagatagcgaacaaaaattagaacacgctatgtctaaatgggaagaattacaacaaaaactataaaaatatacataactctaactgtaaattcgctatagttagagttatttttttacaaattttaattttttttattcacaataaaaacgctgatattatagctatccacagacttatcctagttatccacaagtaaattaacactaatcaattatttattttctgttttcccacctgatatccacaataaatgacgttatcaacaccttttatccacaagttattcactctttgttgataagtacgcatgttctctattgacattgtttttatcaaaattcattgttaagacactttctttatgaaataataatattattgaagtatatttttattattattaaaaataaataaggagatacttatgagcacaaatcaaacatttttaatatttgttatagcaattattctacttacatctgtaataggaattgttggacgatacatgagtcgtcaacgtctattaaaatctatggaaacattatggcaaacgatttctccattagaagcttttatcagaccgaactcacatttcgactatgagtataagctctacaaggaaaaatttgaatcacattcattagttgatgataaaacttggtccgacttaaatatgaatgcaatttttcataagatgaattataatttaacagctattggtgaaatgaagctatatgcctgtttacgtggaatgctttcaattacgaacaaatcattacttagtttatttaatgataatgctgaatttagaaaaaacgtaacatatcatttagctttgattggtaaaactgtttatccaacatttccagaccaaatcacaccggtaaaacgtcaaaatatattgtttctatgcccgtttttaccagttatctcatttgcagttatatttattaattcacaagttggtattttattatttcttatgagttgcctatttaatatcattttatcagcaactttaaagcgtacatatgaggatgacttaaaatctatcttttatgcatccaatgttttaaaacaaggctatactatctcaaaaattaaacatgctccacaacctgaagtcaattttaagcaatttagaacagcacgtcatttaacgagtgttttagctgaagttaatgatgaagatatcggagctatggtaattaaactagttaaacttattttcatgcttgattatgttttatttcattcaattcaaaaaagctatacaacacatatgaatgagcttaaaaattgtttcgattacatagctgaattagataatcattatgcattagcaatgtatcgtagaacgctagaatgttatactgaaccacaaattgatgatacaaatgatggcatagtattctctgagttaacacatccactcatagcagatgcagtagccaatgatttctcactttcacaaaatatactgttaactgggtctaatgcttcgggtaaatcaacatttatgaaatccatagcaataaacattattcttgcatcggctatacaaacagttaccgcaagcaaatttgtatatcaacctggaattgtgttcacgtcaatggcaaatgccgatgatgtgttatcaggcgatagttattttatggctgaattaaaatctattaagcgtattgttgaaattccagataatcaaaaaatatactgctttatcgatgaaatttttaaaggtaccaacacaactgaacgaattgccgcttcagaatcagtactatcatttttacatgaaaaatctaactttagagttattgcagcaacacatgatattgagttagctgaactcttaaaacaacgttatgaaaattatcatttcaatgaggtaatagaaaataataacatacattttgattacaaaattaagcctggcaaagcaaatactcgtaatgccatcgaattattaaaaatcacttcatttccagcaaaaatatatgaacgagcaaaagataatgtttccaatggttagcatgaatcttgaacatcaatcaatgttcaagtcgcaacattgttatattgacagtctttgactaaatgaaaatacgcttgtaataagttttttcaatactagtccgggggccccaatacagaggctggcggaaagtcagcttacaataatgtgcaagttggcagaatcccaacataataaatcattagtggttctttatcttttctgtctcactcccctaattgcaatataaaaacgtcagctatcacatgacagaagactatgaacagtttcaataatgttcatcgtaatcatgttaataactgacgtttattttattctgcagaatactcttctaaatctatattgctgtgcccatttaatgctaaatcagcaaatcgaccttgctgatacaaatagtggccggcaacgcctatcattgcagcattatctgtgcataatttaggacttgggatagttaattgaatgtcattgactttgcattgatccgctaaagattgacgtaatcctttattactcgccacgccaccagcaacaattaatcgctgaacactatattctttacaagcttgaatagctttaaacgtaagcacctctacaacactattttgaaagctcgttgctacgttagcttcaatgattggaatatttttttgtcgttgattgtgaagttgattgatcacggcacttttcaacccactaaaactaaaatcataactatctttatccaaccaaacacgagggaatgaataagtatcttcaccttcagcagccaaccgatcaacttgtggaccacctggataatttaaaccaattgttcgtgccactttatcataagcctcacctactgcgtcatctcgtgtttcaccaatgacttcaaatgataaatgatctttcatataaactaattcagtatgtccacctgaaacaataagtgcaattagcgggaatgttaatggctcttctatgtgattagcatatatatgtcctgcaatatgatgaacaggaataagtggcttatcgtaagcaaatgccaatgctttggctgcattaacacctattagtaacgcaccaattagtccagggccttctgtaaccgctatggcatcaatatcttccattgatacatcggcatccactagagcctcgtttattgttgttgttataccttcaacgtgatgtctacttgccacttcgggaacgacaccgccaaatcgtttatgactttcaatctgacttaaaactgtatttgataaaatatctctgccattttttataacactaacgcttgtttcatcacaacttgtttcaacagctagtattaatatatctttagtcatttaaattcacccacataaccattgcgtcctcaccttcaccataataatttttacgtttaccaccatattgaaatcctaaattttcatatacatgttgtgccactttattattaactcttacttctaaactcatcacatcacaagtgtgacttgcatagtttattccgtattttaaaagcatttgacctaaaccatagcctctataattatcatcgattgcaactgttgtaatttgagcttgatcgataacaatccataaacctaaataaccaataatttgttgttcaaattctaagacaaaatatttcgcaaagttattttgctctatttcatgataaaatgcgtcaattgtccaagaactgtcattgaaactccgacgctcaagatcaaagacttgtggcacatcttctttagtcatctctctaatgtttaattgttcttttgactgttgatccaatttcgttccgcctcagctaatttatggtatttaggagtaaatgtatgtacgtctgtaggtttatctatcaattgatacatgactgatgcatttggtagctgcgcaatcacttcaccttgtaattcatcttgtaattttatagtatctttcccaatataaataaatggttggtttaaatcttctaaaaaagctcgcaatgcctctatcgacatatattgatcttctaaaatagtcactaattgaccattttgccactggaatatgcctgtataaactgcttgtcgtcttgcatcaaacacaggaaccaataatttatcagtatgatcgattgttgctgccaatgcctttaatgatgaaacaccatataatttaacatctaacgcatacgctaatgttttagcaacagtaacaccgatacgtaagccagtatatgaaccaggaccttcagcaacaataatcgcatctaattgctgtttagctattttgctctgctcaaatagctgactaatcgcaggcattaattgcactgaatgattttgtttagaatccgtagttatttcagctaaaacttcatcgttttgcatcaatgctactgataatggttgattcgatgtatcaatgagcagcgaattcatggataattgcctccttaatttgttcataatgttctccttgcgcgaacaactcaatttgtcttgtattttcagatattgttgaaatgttaatagataaatgcgtcgctggaagtaaatcttttataaattgactccattcaataacagtaattgcctgatcttcgaaaaattcatcaaaccctaaatcttcatcagaatcttctaagcgataacaatccatatgatgcaattttaaatttttacccctatatgatttaatgatgttaaatgtcggggaattaatcgtacgtcttacaccaagagcttttcctataaattgcgttaacgttgttttacctgctcctaaatctccgttaagtaaaatcaaatcaccacttttcaattgctcaactaaaaacatagcaaattgattcatttcatctaaattatttatctttatcaatgttgattctcctatattatgcttttcattcataaaaatgattatccattgttcaatcgtatctaactttatatttaacctttatattgtaacaaatttcaacttaaatttcttatctttgaaacagattatctattcaaagttaattgtaagaaaatttaaaatatttgttgacatactaaagcagatatagtaaattaaatttatcaaatttttagacaattctaactattaaagtgatatataccattcacggaaggagtataataaaatgcttaatcaatatactgaacatcaaccgacaacttcaaatattattattttattatactctttaggactcgaacgttagtaaatatttactaaacgctttaagtcctatttctgtttgaatgggacttgtaaacgtcccaataatattgggacgtttttttatgttttatctttcaattacttatttttattactataaaacatgattaatcattaaaatttacgggggaatttactatgcgaagcgacatgatcaaaaaaggagatcaccaagcaccagcaagaagtcttttacatgccacgggcgcgctaaaaagtccaactgatatgaacaaaccatttgtagctatttgtaactcttatattgatattgttcctggacatgttcacttgagagagcttgcagatatagctaaagaagcaattagagaagccggtgccattccatttgaattcaatacaattggtgttgatgatggaatagctatgggacatatcggaatgcgatattctctaccatcacgtgaaattattgcagatgcagctgaaactgtaattaacgctcattggtttgacggcgtattttacattcctaattgtgacaagattacacccggtatgattttagcagccatgaggacaaacgtaccagctatcttttgctctggtggaccaatgaaagctggcttatctgcacatggaaaagcattaacactttcatcaatgtttgaagcagtcggcgcatttaaagaaggatcgatttctaaagaagaatttttagatatggaacaaaatgcctgccctacttgtggttcatgtgctgggatgtttactgcaaattcaatgaactgtttgatggaagttttaggtctagcattaccatacaacggtactgcacttgcagtcagtgatcagcgacgcgaaatgattcgccaagcagcttttaaattagttgaaaatattaaaaatgatttaaaaccacgtgatatcgttactcgcgaagcaattgatgatgcatttgcacttgatatggctatgggtggttcaacaaacacggtactgcatacgttagccattgccaatgaagctggtattgattatgacttagagcgcattaatgctattgccaaacgcacgccatatttatcaaaaatagcacctagttcatcgtattcaatgcatgatgtgcatgaagctggtggcgtcccagcaattattaatgaattgatgaagaaagatggcacgttacacccagatagaatcacagttactggcaaaacgttacgtgaaaataacgaaggcaaagaaattaagaactttgatgtcattcaccctcttgatgcaccatatgatgcacaaggcggtttatctatcttatttggtaatatcgcccctaaaggcgcagttattaaagttggcggcgttgatccatctatcaaaacatttactgggaaagcaatttgtttcaattcgcatgatgaagctgttgaagcaatagacaatcgtaccgttcgtgcaggccacgtcgttgtcattagatatgaaggacctaaaggtggaccaggtatgcctgaaatgttagcacctacttcctctattgttggtcgcggcttaggtaaagatgttgcattaattactgatgggcgtttttccggtgccacaagaggtattgcagttggtcatatttcccctgaagctgcatctggtggaccaattgccttaattgaagatggagatgagattactattgatttaacaaatcgtacattaaacgtaaaccagcctgaagatgttctagcgcgtcgccgagaatctttaacaccgtttaaagcgaaagtaaaaacaggttatctagctcgttatactgccctagtaactagcgcaaatacaggtggcgtcatgcaagtccctgagaatttaatttaatttatttttatattggagatggttaaaatgtctaaaactcaacatgaagtaaaccaaaatattgaccctttaaaaatggctgaatcacttgaacttgaacaactaaatgaaaaaactttaaatgacatgcgttcaggatcagaagtgctagtagaagctctacttaaagaaaatgtggattatttattcggttatcctggtggtgccgtactacctttatacgacacattttatgatggtaaaatcaaacatattttagcaagacacgaacaaggtgctgttcatgctgcagaaggttatgcacgtgtatctggtaaaactggcgtcgttgtagttacaagcggtccaggtgcaactaatgtaatgacaggtattacggatgcacattgcgactctttacctctagttgtattcactggacaagttgctacaccaggcattggtaaagatgcattccaagaagcggatattctatctatgacttcaccaattacaaaacaaaattatcaagtgaaacgtgttgaagatatccctaaaatcgtacacgaagctttccatgtagctaattctggacgcaaaggtcctgtagtgattgattttccaaaagatatgggtgttttagctacaaatgtggatttatgcgacgaaatcaatattccaggttatgaagttgttacagaaccagaaaataaagacattgacactttcatctcacttttaaaagaagcgaaaaagcctgtcgtattagccggcgcaggtattaatcaatcaaaatcaaatcaattattaacacagtttgttaataaacatcaaatcccaacagttactactttactaggtctaggtgctgtaccttatgaggatacactatttttaggtatgggaggtatgcatggttcttatgctagtaacatggcattaactgagtgtgatttactcattaatttaggtagccgcttcgatgatagattagcaagcaaacctgatgcctttgcacctaacgccaaaattgtacatgtagatattgatccttcagaaatcaataaagttattcatgtagatttaggtattattgcagactgtaaaagatttttagaatgtttaaatgataaaaatgttgagactatagaacacagtgactgggttaaacattgtcaaaataataagcagaaacacccatttaaacttggtgaagaagatcaagtattttgtaagccacaacaaacaatcgaatatatcggcaaaattacaaatggtgaagcaattgttactacagacgtgggacaacatcaaatgtgggcagctcaattttatccatttaaaaatcacggacaatgggttacaagcggtggtttaggaacaatgggattcggtattccttcgtcaattggtgccaaattagctaatcctgataaaacagtcgtatgtttcgtcggtgacggtggtttccaaatgacaaaccaagaaatggcacttttacccgaatatggtttagatgtcaaaatcgtactaatcaataatggaacattaggtatggttaaacaatggcaagataagttctttaatcaacgcttctcacactcagtatttaatggtcaacctgattttatgaaaatggcagaagcatatggcgtcaaaggtttcttaatcgataagccagaacaactggaagaacaattagatgcagcgtttgcttatcaaggaccagttttaattgaggttcgtatttcccctactgaagctgtaaccccaatggttccgagtggcaaatcaaatcatgaaatggagggcttataatgacaagaattcttaaattacaagttgcggatcaagtcagcacgctaaatcgaattacaagtgcttttgttcgcctacaatataatatcgatacattacatgttacacattctgaacaacctgggatttctaacatggaaattcaagtcgatattcaagatgatacatcacttcatatattaattaaaaaattaaaacaacaaattaatgttttaacggttgaatgctacgaccttgttgataacgaagcttaattttaagacaaaggcaatgatgcgctaattagttatagatatatcataggctgctagttaacatctgccactattacaaagttatatttcagaattttcgaaaaacaaaacatttaattatttggaggaatttattatgacaacagtttattatgatcaagacgtaaaaacggacgctttacaaggcaaaaaaattgcagtagtaggttatggatcacaaggccacgcgcatgcacaaaacttaaaagacaatggatatgatgtagtcatcggtattcgcccaggtcgttcttttgacaaggctaaagaagatggatttgatgtgttccctgttgcagaagcagttaagcaagctgatgtaattatggtgctattacctgatgaaattcaaggtgatgtatacaaaaacgaaattgaaccaaatttagaaaaacataatgcgcttgcatttgctcatggctttaacattcattttggtgttattcaaccaccagctgatgttgatgtatttttagtagctcctaaaggaccgggtcatttagttagacgtacatttgttgaaggttctgctgtaccatcactatttggtattcaacaagacgcttcaggtcaagcacgtaatattgctttaagttatgcaaaaggtattggtgcaactcgtgcaggtgttattgaaacaacatttaaagaagaaactgagacagatttatttggtgaacaagcagtactttgcggtggtgtatcgaaattaattcaaagtggctttgaaacattagtagaagcgggttatcaaccagaattagcttattttgaagtattacatgaaatgaaattaatcgttgatttgatgtatgaaggcggtatggaaaatgtacgttactcaatttcaaatactgctgaatttggtgactatgtttcaggaccacgtgttatcacaccagatgttaaagaaaatatgaaagctgtattaactgatatccaaaatggtaacttcagtaatcgctttatcgaagacaataaaaatggattcaaagaattttataaattacgcgaagaacaacatggtcatcaaattgaaaaagttggtcgtgaattacgcgaaatgatgccttttattaaatctaaaagcattgaaaaataagatagacctacaatgaggagttgttaaatatgagtagtcatattcaaatttttgatacgacactaagagacggtgaacaaacaccaggagtgaattttacttttgatgaacgcttgcgtattgcattgcaattagaaaaatggggtgtagatgttattgaagctggatttcctgcttcaagtacaggtagctttaaatctgttcaagcaattgcacaaacattaacaacaacggctgtatgtggtttagctagatgtaaaaaatctgacatcgatgctgtatatgaagcaacaaaagatgcagcgaagccggtcgtgcatgtttttatagcaacatcacctattcatcttgaacataaacttaaaatgtctcaagaagacgttttagcatctattaaagaacatgtcacatacgcgaaacaattatttgacgttgttcaattttcacctgaagatgcaacgcgtactgaattaccattcttagtgaaatgtgtacaaactgccgttgacgctggagctacagttattaatattcctgatacagtcggctacagttaccatgatgaatatgcacatattttcaaaaccttaacagaatctgtaacatcttcaaatgaaattatttatagtgctcattgccatgacgatttaggaatggctgtttcaaatagtttagctgcaattgaaggcggtgcgagacgaattgaaggcactgtaaatggtattggtgaacgagcaggtaatgcagcacttgaagaagtcgcgcttgcactatacgttcgaaatgatcattatggtgctcaaactgcccttaatctcgaagaaactaaaaaaacatcggatttaatttcaagatatgcaggtattcgagtgcctagaaataaagcaattgttggccaaaatgcatttagtcatgaatcaggtattcaccaagatggcgtattaaaacatcgtgaaacatatgaaattatgacacctcaacttgttggtgtaagcacgactgaacttccattaggaaaattatctggtaaacacgccttctcagagaagttaaaagcattaggttataacattgataaagaagcgcaaatagatttatttaaacaattcaagaccattgcggacaaaaagaaatctgtttcagatagagatattcatgcgattattcaaggttctgagcatgagcatcaagcactttataaattggaaacactacaactacaatatgtctctagcggccttcaaagtgctgttgttgttgttaaagataaagagggtcatatttaccaggattcaagtattggtactggttcaatcgtagcaatttacaatgcagttgatcgtattttccagaaagaaacagaattaattgattatcgtattaattctgtcactgaaggtactgatgcccaagcagaagtacatgtaaatttattgattgaaggtaagactgtcaatggctttggtattgatcatgatattttacaagcctcttgtaaagcatacgtagaagcacatgctaaatttgcagctgaaaatgttgagaaggtaggtaattaattatgacttataacattgttgccctacctggtgatggaatcggtccagaaattttgaacggatctctatcattgcttgaaattataagtaataaatataactttaattatcaaatagagcaccacgaatttggtggtgcctctattgatacattcggcgagcctttaactgagaaaaccttaaatgcgtgtaaaagagcagatgctattttactgggtgcaatcggtggacctaaatggacagatcctaacaatcgaccagaacaaggattattaaaattgcgtaaatccttaaatttatttgcaaatattcgccccactaccgttgtcaaaggcgctagttctttatcacctttaaaggaagaacgcgttgaaggcacagatttagttatagtccgtgaattgacaagtggtatttattttggagaacctagacattttaataatcacgaggccttagattctcttacttatacaagagaagaaatagaacgcattgttcacgtagcatttaaattggccgcttcaagacgaggaaaactaacatcagttgataaagaaaatgtattagcttctagtaaattgtggcgcaaagtcgtaaatgaagtaagtcaattatatccagaagtaacagtaaatcacttacttgttgatgcttgtagtatgcatttaatcacaaatccaaaacaatttgacgtcatcgtatgtgaaaacttatttggcgatattttaagtgatgaagcttcagtgattcctggttcacttggtttatcaccttctgccagttttagtaacgatggtccaagattgtatgagcctattcatggatcagcaccagatattgcaggtaaaaacgttgccaatccatttggaatgattctatctttagcgatgtgtttacgtgaaagcttaaatcaaccagatgctgcagatgaattagaacaacatatttataacatgattgaacatgggcaaacgacagcagatttaggcggcaaattgaatactactgatattttcgaaattctatctcaaaaattgaatcactaagggggagatgtaaatgggtcaaacattatttgacaaggtgtggaacagacatgtgttatacgggaaattgggcgaaccgcaactattatacattgatttacaccttatacatgaagttacttctcctcaagcatttgaaggacttaggcttcaaaacagaaaattaagacgcccagatttaacatttgcaacactcgatcacaatgttcctactattgatattttcaatattaaagatgaaattgcaaacaaacaaatcacaacattacaaaaaaacgccatagattttggggtgcatatttttgatatgggctctgatgaacaaggtattgttcacatggtaggacctgagacaggacttacacagcccggcaaaacaatcgtttgtggtgactctcacacagcaacacatggagcatttggtgctattgcatttggaattggaacaagtgaagttgaacatgttttcgcaactcaaacgctatggcaaacaaaacccaaaaacttaaaaatcgatattaatggtaccttaccaacaggcgtctatgctaaggacattattctgcatttaattaaaacgtatggtgttgattttggtacaggctatgctttggaatttactggcgaaacaattaaaaacctttcaatggacggtcgaatgactatttgtaacatggctatcgaaggtggtgccaaatacggcataatccaacctgatgatataacatttgaatatgttaaagggagaccatttgccgataacttcgctaaatcagttgataagtggcgtgagctatattctgatgacgacgcgatatttgatcgtgtaattgaacttgatgtttcaacattagaaccacaagtgacatggggaactaatcctgaaatgggtgttaatttcagtgaaccattccctgaaatcaatgatatcaacgatcaacgtgcgtatgattatatggggttagaaccaggtcaaaaagctgaagacatcgacttagggtatgtttttctcggttcatgtacaaatgctagactatcagatttgattgaagctagtcatattgttaaaggaaataaagttcatccaaatattacagctattgtcgtaccaggttctcgtacagtaaaaaaagaagcagaaaaattaggtctagatactatctttaaaaatgcaggatttgaatggcgtgaaccaggatgttcaatgtgtttaggcatgaatcctgaccaagtacctgagggcgtacattgtgcatctacaagtaatcgaaactttgaaggacgacaaggcaaaggtgcaagaacacatttagtatcccctgctatggcagcagcagcagctattcatggtaaatttgtggacgtaagaaaggtggttgtttaaatggcagcaatcaaacctattacaacatataaaggtaaaatagtccctctcttcaacgacaatatcgatacagaccaaatcattcctaaggtacacttaaagcgtatttcaaaaagtggctttggtccatttgcttttgatgaatggcggtacttacctgatggttcagataatcctgatttcaatcctaacaaaccacaatataaaggggcttctattttaattactggagataattttggatgtggttcaagtcgtgaacatgctgcttgggctcttaaggactatggttttcatattattattgcaggaagtttcagtgacatattttatatgaattgcactaaaaatgcgatgttgcctatcgttttagaaaaaagtgctcgtgaacatcttgcacaatatgaggaaattgaaatagatttaccaaatcaaactgtgtcatcaccagacaagcgtttccattttgaaattgatgaaacttggaaaaataaacttgtaaatggcttagatgacattgcaatcaccctacaatatgaatcattaatagaaaaatatgaaaaatcactttaagggagttgaatattatgacagtcaaaacaacagtttctacgaaagatatcgatgaagcatttttaagacttaaagatattgtcaaagaaacacctttacaattagaccattacttatctcaaaagtatgattgtaaagtttatttaaaacgagaagatttacaatgggtacgttcttttaaattaagaggtgcttacaacgctatttctgttttatcagatgaagctaaaagtaaaggtattacatgtgcgagtgcaggtaatcatgctcaaggtgttgcctatacagctaaaaaacttaatttaaacgctgttatctttatgccagtcactacacctttacaaaaggtaaatcaagtaaagttctttggaaatagtaacgttgaagttgtactcactggtgatacatttgatcactgtttagctgaagctttaacttatacaagtgaacatcaaatgaactttatagatccattcaataatgttcatacaatttctggacaaggtacgcttgctaaagaaatgctagaacaatcaaagactgacaatgttaactttgattatttatttgccgctattggtggtggtggattaatttcaggtattagtacttactttaaaacctattcacctactacgaaaattataggtgttgaaccttcaggtgcaagtagtatgtatgaatctgttgtcgtaaataatcaggtagtcacattgcctaatatcgataaatttgtggacggtgcatctgtagctagagttggcgatattacatttgaaattgcaaaagaaaatgtagatgattacgttcaagtagatgaaggtgcagtttgttctacgattttagacatgtattcaaaacaagcaattgtagcagaacctgctggcgcattaagtgtgagtgctcttgaaaactacaaagaccacattaagggtaaaactgttgtttgtgtcattagtggtggtaataatgatattaatcgtatgaaggaaattgaagaacgttctttattatatgaagaaatgaaacattattttattttaaacttccctcaacgccctggtgcattaagagaatttgtaaatgatgttttaggcccacaagacgatattacaaaatttgaatacttaaaaaaatcttctcaaaatacaggtactgtcattattggtattcaacttaaagatcatgatgatttaatacaactcaaacaacgtgtaaatcatttcgatccttccaatatttatattaatgaaaataagatgttatattcattgttaatttaacacatagtaagaaaaacagtcataaattgatttctaattgaaatcatcttatgactgctttttattatactttacatttctcgtttcgtcagattcaaacgttttcacttcgccaagccatctttctttgtgtttgctttttactatgtaactttagacataaaaaaagagaccttgcggtctcaatgcggctcatcgcatccactttttgcctggcaacgttctactctagcggaacgtaagtttgctaccttcgtcgctaagaacctttcttgacttgtgacaatcgcttgcttctttcctctccttcggctctcgcttactcatttagctctactaaactcgttgcactcttttctcgtttcgtcagattcaaacgttttcacttcgccaagccatctttctttgtgtttgcttttattttgacgttttagacataaaaaaagagaccttgcggtctcaacttgcctggcaacgttctactctagcggaacgtaagtttgctaccatcgtcgctaaagacctttcttgacttgtgacaatcgcttgcttctttcctctccttcggctctcgcttactcatttagctctactaaactcgttgcgctcttttcttgtttcgtcagattcaaacgttttcacttcgccaagccatctttctttgtgtttgcttttattttgacgttttagacataaaaaaaagagacctgcggtctcaacttgcctggcaacgttctactctagcggaacgtaagttcgactaccatcgacgctaaggagcttaacttctgtgttcggcatgggaacaggtgtgacctccttgctatagtcaccagacatatgaatgtaaattatacattcaaaactagatagtaagtaaaagtgattttgcttcgcaaaacatttattttgattaagtcttcgatcgattagtattcgtcagctccacatgtcaccatgcttccacctcgaacctattaacctcatcatctttgagggatcttataaccgaagttgggaaatctcatcttgaggggggcttcatgcttagatgctttcagcacttatcccgtccacacatagctacccagctatgccgttggcacgacaactggtacaccagaggtatgtccatcccggtcctctcgtactaaggacagctcctctcaaatttcctacgcccacgacggatagggaccgaactgtctcacgacgttctgaacccagctcgcgtaccgctttaatgggcgaacagcccaacccttgggaccgactacagccccaggatgcgatgagccgacatcgaggtgccaaacctccccgtcgatgtgaactcttgggggagataagcctgttatccccggggtagcttttatccgttgagcgatggcccttccatgcggaaccaccggatcactaagtccgtctttcgaccctgctcgacttgtaggtctcgcagtcaagctcccttatgcctttacactctatgaatgatttccaaccattctgagggaacctttgagcgcctccgttaccttttaggaggcgaccgccccagtcaaactgcccgcctgacactgtctcccaccacgataagtggtgcgggttagaaagccaacacagctagggtagtatcccaccagcgcctccacgtaagctagcgctcacgtttcaaaggctcctacctatcctgtacaagctgtgccgaatttcaatatcaggctacagtaaagctccacggggtctttccgtcctgtcgcgggtaacctgcatcttcacaggtactatgatttcaccgagtctctcgttgagacagtgcccaaatcgttacgcctttcgtgcgggtcggaacttacccgacaaggaatttcgctaccttaggaccgttatagttacggccgccgtttactggggcttcgattcgtagcttcgcagaagctaaccactcctcttaaccttccagcaccgggcaggcgtcagcccctatacatcaccttacggtttagcagagacctgtgtttttgataaacagtcgcttgggcctattctctgcggctcttctgggcgttaaccctaaagagcaccccttctcccgaagttacggggtcattttgccgagttccttaacgagagttcgctcgctcaccttagaattctcatcttgactacctgtgtcggtttgcggtacgagcacctattttctatctagaggcttttctcggaagtgtgaaatcaacgactcgaagacacaatgtcttctccccatcacagctcagccttaacgagtaccggatttgcctaatactcagccttactgcttagacgtgcaatccaatcgcacgcttcgcctatcctactgcgtccccccatcgattaaaacgattataggtggtacaggaatatcaacctgttatccatcgcctacgcctgtcggcctcagcttaggacccgactaacccacacatagtaagaaaaacagtcataaattgatttctaattgaaatcatcttatgactgctttttattatactttacatttctcgtttcgtcagattcaaacgttttcacttcgccaagccatctttctttgtgtttgctttttactatgtaactttagacataaaaaaagagaccttgcggtctcaatgcggctcatcgcatccactttttgcctggcaacgttctactctagcggaacgtaagtttgctaccttcgtcgctaagaacctttcttgacttgtgacaatcgcttgcttctttcctctccttcggctctcgcttactcatttagctctactaaactcgttgcactcttttctcgtttcgtcagattcaaacgttttcacttcgccaagccatctttctttgtgtttgcttttattttgacgttttagacataaaaaaagagaccttgcggtctcaacttgcctggcaacgttctactctagcggaacgtaagtttgctaccatcgtcgctaaagacctttcttgacttgtgacaatcgcttgcttctttcctctccttcggctctcgcttactcatttagctctactaaactcgttgcgctcttttcttgtttcgtcagattcaaacgttttcacttcgccaagccatctttctttgtgtttgcttttattttgacgttttagacataaaaaaaagagacctgcggtctcaacttgcctggcaacgttctactctagcggaacgtaagttcgactaccatcgacgctaaggagcttaacttctgtgttcggcatgggaacaggtgtgacctccttgctatagtcaccagacatatgaatgtaaattatacattcaaaactagatagtaagtaaaagtgattttgcttcgcaaaacatttattttgattaagtcttcgatcgattagtattcgtcagctccacatgtcaccatgcttccacctcgaacctattaacctcatcatctttgagggatcttataaccgaagttgggaaatctcatcttgaggggggcttcatgcttagatgctttcagcacttatcccgtccacacatagctacccagctatgccgttggcacgacaactggtacaccagaggtatgtccatcccggtcctctcgtactaaggacagctcctctcaaatttcctacgcccacgacggatagggaccgaactgtctcacgacgttctgaacccagctcgcgtaccgctttaatgggcgaacagcccaacccttgggaccgactacagccccaggatgcgatgagccgacatcgaggtgccaaacctccccgtcgatgtgaactcttgggggagataagcctgttatccccggggtagcttttatccgttgagcgatggcccttccatgcggaaccaccggatcactaagtccgtctttcgaccctgctcgacttgtaggtctcgcagtcaagctcccttatgcctttacactctatgaatgatttccaaccattctgagggaacctttgagcgcctccgttaccttttaggaggcgaccgccccagtcaaactgcccgcctgacactgtctcccaccacgataagtggtgcgggttagaaagccaacacagctagggtagtatcccaccagcgcctccacgtaagctagcgctcacgtttcaaaggctcctacctatcctgtacaagctgtgccgaatttcaatatcaggctacagtaaagctccacggggtctttccgtcctgtcgcgggtaacctgcatcttcacaggtactatgatttcaccgagtctctcgttgagacagtgcccaaatcgttacgcctttcgtgcgggtcggaacttacccgacaaggaatttcgctaccttaggaccgttatagttacggccgccgtttactggggcttcgattcgtagcttcgcagaagctaaccactcctcttaaccttccagcaccgggcaggcgtcagcccctatacatcaccttacggtttagcagagacctgtgtttttgataaacagtcgcttgggcctattcactgcggctcttctgggcgttaaccctaaagagcaccccttctcccgaagttacggggtcattttgccgagttccttaacgagagttcgctcgctcaccttagaattctcatcttgactacctgtgtcggtttgcggtacgggcacctattttctatctagaggcttttctcggcagtgtgaaatcaacgactcgaagacacaatgtcttctccccatcacagctcagccttaacgagtaccggatttgcctaatactcagccttactgcttagacgtgcaatccaatcgcacgcttcgcctatcctactgcgtccccccatcgattaaaacgattataggtggtacaggaatatcaacctgttatccatcgcctacgcctgtcggcctcagcttaggacccgactaacccagagcggacgagccttcctctggaaaccttagtcaatcggtggacgggattctcacccgtctttcgctactcacaccggcattctcacttctaagcgctccacatgtccttacgatcatgcttcaacgcccttagaacgctctcctaccattgtccaaaggacaatccacagcttcggtaatatgtttagccccggtacattttcggcgcagtgtcactcgactagtgagctattacgcactctttaaatgatggctgcttctaagccaacatcctagttgtctgggcaacgccacatccttttccacttaacatatattttgggaccttagctggtggtctgggctgtttccctttcgaacacggaccttatcacccatgttctgactcccaagttaaattaattggcattcggagtttgtctgaattcggtaacccgagaggggcccctcgtccaaacagtgctctacctccaataatcatcacttgaggctagccctaaagctatttcggagagaaccagctatctccaggttcgattggaatttctccgctaccctcagttcatccgctcacttttcaacgtaagtcggttcggtcctccattcagtgttacctgaacttcaacctgaccaagggtagatcacctggtttcgggtctacgaccaaatactaaacgccctattcagactcgctttcgctacggctccacatttactgcttaaccttgcatcaaatcgtaactcgccggttcattctacaaaaggcacgccatcacccattaacgggctctgactacttgtaagcacacggtttcaggttctatttcactccccttccggggtgcttttcacctttccctcacggtactggttcactatcggtcactagagagtatttagccttaggagatggtcctcccagattccgacggaatttcacgtgctccgtcgtactcaggatccactcaagagagacaacattttcgactacaggattattaccttctttgattcatctttccagatgattcgtctaatgtcgtcctttgtaactccgtatagagtgtcctacaaccccaacaagcaagcttgttggtttgggctcttcccgtttcgctcgccgctactaagggaatcgaattttctttctcttcctccgggtactaagatgtttcagttctccgggtgtgccttctgatatgctatgtattcacatatcgataacatgacataactcatgctgggtttccccattcggaaatctctggatcaaagcttacttacagctccccaaagcatatcgtcgttagtaacgtccttcatcggcttctagtgccaaggcatccaccgtgcgcccttaataacttaatctatgtttccaccatttttataagtcaaacgttaacatgaagttacgttcttttataaaaagatttaaacgcgttattaatcttgtgagtgttctttcgaacactagcgattatttcttatgaattcaagcttatttaaaactctttattcactcggttttgcttggtaaaatctatattttacttacttatctagttttcaatgtacaatttctttttagtcaagcgctcgcatactgctttattttcaaaaaatcaaatgctcatttacaaaagtaaactccgctttaatttttcttaatgcattgtctgacaatcgctttctttaaaaagaatagattgtcaagcgctcgcataagcaatatcactttaaccaaaaaatatttgaatgttaaataaacattcaaaactgaatacaatatgtcacgttattccgcatcttctgaagaagatgttccgaatatatccttagaaaggaggtgatccagccgcaccttccgatacggctaccttgttacgacttcaccccaatcatttgtcccaccttcgacggctagctcctaaaaggttactccaccggcttcgggtgttacaaactctcgtggtgtgacgggcggtgtgtacaagacccgggaacgtattcaccgtagcatgctgatctacgattactagcgattccagcttcatgtagtcgagttgcagactacaatccgaactgagaacaactttatgggatttgcttgacctcgcggtttcgctgccctttgtattgtccattgtagcacgtgtgtagcccaaatcataaggggcatgatgatttgacgtcatccccaccttcctccggtttgtcaccggcagtcaacttagagtgcccaacttaatgatggcaactaagcttaagggttgcgctcgttgcgggacttaacccaacatctcacgacacgagctgacgacaaccatgcaccacctgtcactttgtcccccgaaggggaaggctctatctctagagttgtcaaaggatgtcaagatttggtaaggttcttcgcgttgcttcgaattaaaccacatgctccaccgcttgtgcgggtccccgtcaattcctttgagtttcaaccttgcggtcgtactccccaggcggagtgcttaatgcgttagctgcagcactaaggggcggaaaccccctaacacttagcactcatcgtttacggcgtggactaccagggtatctaatcctgtttgatccccacgctttcgcacatcagcgtcagttacagaccagaaagtcgccttcgccactggtgttcctccatatctctgcgcatttcaccgctacacatggaattccactttcctcttctgcactcaagttttccagtttccaatgaccctccacggttgagccgtgggctttcacatcagacttaaaaaaccgcctacgcgcgctttacgcccaataattccggataacgcttgccacctacgtattaccgcggctgctggcacgtagttagccgtggctttctgattaggtaccgtcaagatgtgcacagttacttacacatatgttcttccctaataacagagttttacgatccgaagaccttcatcactcacgcggcgttgctccgtcaggctttcgcccattgcggaagattccctactgctgcctcccgtaggagtctggaccgtgtctcagttccagtgtggccgatcaccctctcaggtcggctatgcatcgttgccttggtaagccgttaccttaccaactagctaatgcagcgcggatccatctataagtgacagcaagaccgtcttttacttttgaaccatgcggttcaaaatattatccggtattagctccggtttcccgaagttatcccagtcttataggtaggttatccacgtgttactcacccgtccgccgctaacatcagagaagcaagcttctcgtccgttcgctcgacttgcatgtattaggcacgccgccagcgttcatcctgagccaggatcaaactctccataaaaattatgatgtttgattagctcataaatactaaataatgtttgtaacttatagttacgtttttggaattaacgttgacatattgtcattcagttttcaatgttcattaaaattatctatggagcgggtgatgggaatcgaacccacaacatcagcttggaaggctgaggttttgccattaaactacacccgcttatttaattaagaattttgatgcggccgagaggacttgaacctccacgggatttctcccactaggccctcaacctagcgcgtctgccattccgccacgaccgcggatataggcatttaaaacatcttcgtttttcagaacgttatttattatattatgttttaaaatatttgtcaataacttttaatcgtttttttacaataaattaatttgtgttatcagttgttaacacaacgctatttataataaaacattaagaacttattgtcaacatattttataaattaaatttagaattgactgtctttcaaatcaaagtttatttaatttgttcttttttaaggaacgtgtttaatcatactaactataagctgtacagtcaatagaaaagttcaatcaaaatgtcattaaaaatgtataattatcttttgtgctactttaaagctttaattgggtaaagtttatatattatttattactaaaatacgtcaagatttttaatctaatcaatttaatttcatcctatcaagtcacaatttatgccattacctatatcataagtagaaaagccgagattgcgaagtattaaattacgacaatctcggctttaaacattttataaacacaatttcttcttattcaattactatgtttaccaatcaaaataactcactgataaattctatagaaattccatacaactcataaataatcttacatatacacgaattagctctatttgtattgtacttatttcaattgtcttttcattcttaattttccattgcaatgtccgcaacgcatacgattcgtatcaactttacggatacgtatatattttgcatgacatttagtacaataatattcataattcgcccgttgttgatagctttcaatgctgttacaaaatctaggcgctccaacctgttggctcaatcgtttaaaatcttgatctttatgttgataacctttaccagcaatatgcaagtgataatgacacaattcgtgcagtataatttttacaacagcatcttctccataatgctcatattgttttggattaatttcaatatcatgggactttaaaagataacgtccgcctgttgtacgtaaccttttattaaaatatgcacaatgtcgaaacgtacgtccaaatttttcttccgaaaggttctcaaccattcgctgaagtttgtcattattcatgtggatcaatcatcgttaatgatactttgtctttatttttgtcaatactgtaaacccaaacgtcaacgatatcaccaacactgacaatatccattggattttttacgaacttcttagaaagtttcgaaacatggacaagtccatcttgtttaacacctatatctacaaatgctccaaaatctactacatttctaactgtgccactcaatttcattccttcttttaaatcttcaattgatagcacatcggatttaaggattggtgtatcaaactcgtcccttgggtctcgattaggtgctttcaaggatttaataatatcctctaatgtaggtacaccgacttgtaattcaatcgccagttcatccatatccaatgaatttaatttagcttttaatgcatcactacctaaatcattgccaccaaatccgagtttatctaataactgatacgttactttatagctttcgggatgaatcgatgtattatccaatggctctgaaccgtctactattcttaaaaatcctatactctgctcaaaagttttagcacccaaacgcttaatcttgcttaactctttattatgctttattgcgccattttcttctctatatgcaattatatttttagcaatttgcgaacttagaccagacacatattgtaataatgatgatgatgctgtattgacatcaacacctacttggttaactgctgtttcaacaacgaaagttaatgcattttctagtgctttttgattaacatcatgctggtattgtccgacaccaatagatttaggatcgattttaactaattcacttaatggatcttgaacgcgtcgtccaattgatacggcacttctttcttccacttgaaaatcaggaaattcatctctagcaatttctgatgctgagtatactgaagcgcccgcttcattgacaatgatgaattgtactggcaactgatgctttttaattaaatctgcaacaaattgttctgtttcacgacttgcagtaccattgccaattgcaattaattgcacatcatacgctttaaccatttgtacaaaatccttctctgctgcctcttttttagaaactggtggatgcggataaatcacaccttttgctataaaagtaccgaatgggttaatgactgctaatttacaacctgttctaaatgctggatctacgcctaatatttgtttacctttcattggaggttgcagtaatagatttcttaagttttcactaaaaacatctattgcatgattttcagctttttcagttaaatcagcatggatttcacgctctatcgaagggacaattaagcgtttcaagctatctttaatcgcctctaaaatataactgcgatttacattattatgattgatttcttgacgtgcaatgaaatcctctactgatgtcgtatcgaattcaaactttacagataatactttctctttttcaccacgattaacagctaaaactctatgattagcaatgcgtttaattggctcactatatgcatagtacatttcaaaaatacctttttcatcttcagcatttttctttttagatgtagttaacacaccttgatgatacatatcttttaaaatttttgttctatatttaggattatctgaaatttgttccgcaataatatcttgtgcacctttgatagcatcttcaaccgattgcacttcttcatttataaattgttgtgctttttcttcaattgagacttcatgtttacgtgccttcatccatatcgctaatggctctaaccctttacgtttcgcctcagttgcccttgtctttttcttttgtttaaaaggcctatataggtcttcaacacgttgtaatttgttctgttttaaaatatccttctttaattcctcagtaagtaatccttgctgttctatatttttgataacttcttctttacgtttttgtaaattgaccatatattggtattcgtcatcaatttgctttatttgaacttcatctagtccaccagtttgctcttttcgatacctcgcaataaatggtactgtatttttttcttctagcagtgttaatactgcttcaatttgttttttactaaattgatatttctctatgattgaattaatcaattgattgtccatttacttaacccacactttttcttaaatttactcatttattttaacatattctaaaatacttctattaaggtatgatacttaatgtaattttcacttccaaaacatttaaaacgaattattaggtcatactatattttaaaacgcactaagattattgaaaatgacacaccatcatttctaaatttcataatctaagactactttttttattctaatagcaatccacctatttaaaacgacaattagatatcttcttcacttaaattattaatactatatcgcgacatttatgtggatacacattaaactacgttaataatgtattaattcgaaaatcttaattaaattaaaaatacccctcgatttcaatttaataatcaagggataattatatggatttttcattataaaacgtatcattaataagcaaattctatttatgtgctgcttcttgtaatttcttaattgccgttctctgaagtcgtgatacatgcatttgacttaaaccgatacgctcacctgtctctttttgactcaatccttcaataaacgtacattgtatgatttctcgttcgcgatcagataatataggtaatattttttctaaaatcatacgtttttcagttaagtcataatggtcatcttgttgccccataatatctaatagcgtaacagttgaaccatctttatcagcttcaatggaatgatcaacacttaacgcattataactttgtcccatttccattgcttctaacacttcttcttctgagacttctaatcgattagctatttcactgatagaaggtgaacgctctaattcagcggttagttcatcgctcacttttttgattcttggcccaatttctttaatacgtctcggaacatgtacactccaagttttatctcgtagatatcttttgatttcaccgattacagtaggtactaaaaaggcttcaaacttccgttcaaaggacatatcgaatctatttatggcacctattaaaccaaccataccaacttgaactaaatcttcgtgatgtgattgtcctttagaatatttatatgccaatgactcaattagtttttggtaatgtttaactaacttatcctgtgcatctgtattcttattttcttggtgttctttaatccattggttaatttgctcaggtgaaacttcattagctgatttcgactctttcgccattatttcgcacctgctctttttttatatacttagtcatactgattgtcacaccagattctttatatactgtgacttcatccattaaagattcgattaaaaataaacctaggccaccttcgcgtaaaaagtctatattttcgtctttatcgtaaggacctatttttgatttagttgtttcataatcaaaactgtcacctttatcagaaataacaattttaattttatcttctaaaatttcaaaatatatgttaataatgcccacattgttattttctttgtatgcatgtttaactgcatttgtcacagcttcactaactgcaatcttggcatcttcaatatcatcatatgtagcaccagctctcgaaaaaacgccagaaagtgttaaacgaattaaacttacatactctgccgatgctggcacgcgcatttcgataaaatcttctttagattgcatgttattcgacctccgttccttcattaacatgcattaaatccttaagaccagtaatttcaaatagtctaccgatacgatctgacacacctaaaatgtatagttctttatcattttggtttaatgcttttaatgtacctacgaataaacctaaacctgtcgaatccatataactcacattttctaaattaacataaatatcacgagttccatcttgtctcataggtgttaaaacctcttctaattcaggcacagtataaacatctaattctccaccgactttaacttcgtaaaatttatcttgagtggttgtttctatattaagattcatttcattacactcctacttattaaaaatatttatcttcattttaagcgctgtatccaccatatttatatttcaaattattatatacccatcgaaataatttctaatcttcttttttaaattaatttactctttttataatcaaaatagtcatatcatcttttttatttgggttttgaagctttaaaattgcttcatagataatttgaacaatatcttgtgggtgcatatgtttatgttttttaatatattctaaaagtttttgtttatctataaaggtaccttcactatttctagcttcagtcacaccatccgttaaaatgataattaaatcatcaaggtatataggaatttcttgttgttgatatcgtgtttgtgaactgattcctaacactctacctctaactgaaatttcttcaaattcttctttttcagcgcgataaatatatccaggctcatgaccagctgaactacaatacaataaatggttcatttcttcatataaaccataaaacattgtgacgaacatattttgattaatattcttttcaacaacacgatttaaacgttttaagccatcactcggtaattgtgagtgtccataagaatccatgccaaactttatcatactcattgctaaagcagctggtatacctttcccaatgacatctgcaacagcaaagctcattgtgccatcgttatggtcaattaaattaaaataatctccacttactttttgtgctgccactgaaataacgccaatttgaatactatcaaattgtggaatatctgttttaagcattgtttgttgtaagctagaagctaagtctatctctttatcgtgaacttgaagtttatctatcaatctttgataatctcgataactataaccaaagcctttaacgatttcttgtaagacatctaatgtcttgaacacatcttcacgcgttaagtttaacgtcaatatatagtttttgtgaatatcgacaatgtcttcaggcaagacgtccttacgaatcacttcgtcagtgtatttctcacacttttttatcaattctactttatcttggcacgttaaactttcatcaattaaacccttataatgttgcttaaattcttccacgattagttgcctcctcacttcccttacaaagcaaatgcttaagcaaggataattatgattcacttactaacatttatttaattgcacttatcaattttgtcgtttgcaattttgctgtagatgatacttttaagctaaaaaaaactttaggatggaatacctaaagcctaaaaaacttaagacatccttttataataaaaaatatgaatatcataactggtatttgctaaaatctatgtttataagaaaattcttcgtacagaatttagaaatagttataattattataaagttattgtcttttatatcaatattttatttatctctgaaaaatacatataatagacgcctaatttttctggtgagctactgcattcagccctaaactaatcattagtgcattatctacttctttcattttatcatcggataagtacgtcagtttttctttcaatcgttttttatcaagtgtacgaatttgttctaataatataactgagtctttatccaatttatactttttcttttcaatctctacatgtgtcggtattttcgctttattaatcctaccagttattgccgcaacaataactgtaggactatatttattaccagtatcattttgaattatgactacaggtctgactcccccttgttcagatccctgtactggtgataaatctgctaaataaacatctcctcgtctaatcattcattcgttgaattagaagataaatatgtttcgttgcaatcgcatgcttcacactctatcggaaaagcttcgttcgctagggagagatttaaatcagccatttgtgaatatccttcttttaaagattgttctaagctatgacttctattttgactaaaagataacatatgagaacctccaattgattccaaaagttattaaatgacctttaattactctaatgataacaaattttatatgcactgaccatattattttaacaattcatttgttacaaaacgttgatcaccatcatgatagattcgcggcaaacgtctcgacaagttacaaagcacttcataattaatagtatgttgcttttcagctaccacctctaccgactgtggactttctctatgattatctattaaaatcaccgaatctccagctttaacttgatctggcactttaacaattgtctgatccatacatacgcgaccaataacttcgcattgatgaccatttacatttacaaagctaccttgcattatgcgtaaatagccatctgcatatccaataggtaacaaagctattgtagttgggtcagtagctgtataagttgcaccataacttacagactcacccgcttgtagcgtctttgtttgaactacattagcaattaattgcacacttggtttaaggtgtactttaactttttgctgtacatactctgatggataatatccataaagggaaattcctggtcttattgcattacagaattggcaatccattaatagagagcctgctgagttctgacaatgtatatattcaggtttaattgcttcattgaccatatctttaaaacgttgatattgttcagttgtcatatctcctggttcgtcagcacaggcaaagtgtgtaaacacgccttcaaatacaagttgctcatattgttgaatgatttcaatcacttcttgatacgtattagtatctttaatacctaaacgtcccattcctgtatctaatttaatgtgcaaccataactttttctcttgctcaccagaaatgtttttaattgcttctttcaaccactgtttagacggaaccgttaaggcaactctgtgttgtatcgctttatcaatatctttagctggtaacacacctaagactaaaattttagcagtaatcccatgcattctaagttctatcgcttcatctaacgttgctacagcaaaaaatgtggcgccattttccattaaatgacgtgctactttaacactacctagtccataggcattggctttaacgacagccatcactgttttatttggatgcaatgtactgaatactttgaaatttgatgcaacagcgtttaaatctacattcatatacgcagatctataatatttatccgacatattacttcctcctgtaattcccacacgttttaaaactagatcttaattatcattgtataacaaatttaaaatgctgacttttctaaaacaacttggctcatcgcataatgctcagtgtgtgagatactaacatgtacgatgaacccttcgtaatcaatctttggtttgccaagttcgtcgttgtaacagtctatatcgttaaaagctacatgttttcctaagcctgtgcctaatgctttactgaacgcttcttttgtagcaaacctgccagctaaaaattcaattttacgttgctcatgtgtgaaattgttgaatttgtgctgttcatttttagttaaaatccgctcaaccaattttggctgcttactatataacacttttattcgatcgatttcgattaaatctacaccaattccatgtatcattgattattcctcatttttattgttttctaaatgtctctcgttatttaaccatcgtttcaatctacgtgcttcacttctatctattaattcaatttcagcttgaccacccgctgtataaagggtcaaagttgctaatcgatagcgtctcattataggaccaacatcgatatcaatattttgaatacgaaaatatggtattactttttcatccaaaaataaaatgccgtttcgtacacgcaaatggtgtttttcaaatgcatatctgcagtgcttatatcgatatactggcgctatgacaagcgtgaaaacagcaacaagtaatattataatcacactactaacaatggatatattgttatctaatatctcccaaaatagccagttcaaaatattaaatgcgattaaaagtacaagcgctatgggtatccaaaacagcacagcacttaacctcatcacttttttagcgtgtggtgacataaaattataatccctcatcattttcacctcttaaataccatgatttcaatttatttgcatcttcacttcttgcgtattttaggttaatcgattgggctcccacacctttagcaacaataaagctaaaattatttaaattgttgcgtttaagtaatgtatgttgccaagtgtcaaatcctataatgtgatgcgctttaaaataataaatatttcgtttcaatagctcgaaattctggatagtaatttgttcttctgtcattttaaaacccgcatgtttgacataaagatatcctttgatcacaaataaaccaataatgactattgttataatcgtaaataacaataataattgattccaaaaataacagccaatacctgccatagctatgacaataatactaggtattaaaaagtgtctgtggaaacctgacaaaggcataccttcattaacttgttgataagataaatctggtactaaattctggataatttgatatgctttgtctcgtttaataaacggcaatatcggcacactacctgaatcattgtcatcatcttcgatttttttattttcaaaatcacttgtgatgataaaatgtattgctgtgtagccaaataatcttcgtatatatgactgacgttcaacaacagcttgcaatcgtttcgttggtacagttactttcttcttgttaaagagaccatattcaattttaagttgctcattttcaagcatcaccgaaaagccataaaatcttatcattgttataatcgttccaataatatatgccactattaatactagtaaaatgatgattaatactgaaatacttacaatttgaacccattgactaatttcatgatttagcttcgaccatgggatcaactctcttacagccccgtaaatcggtactaaagctgctaacgttacaccaatggcgccactggtcattgccataaatagtgattctttaaaattcatctgatatataggaatgcgtttatttttctgattaagcatactatcagtgttctgcacttcatctaagcgaccttctgcgatgtcttccacattaccttcaatgtcatgattacagttgtcattcttctcagcactagacttttgcgccacttctgtcttcaactctgtttgcaattgatcaatatatcgttcaagatattcaccttgttttttcgaaataacacttaagacaataccatcacttggtgttttgatttgtaaatccacaccaccaataatttgattgacgaccccttgtgtcatatcaacggactgaatacgttttatatttaattctttacgctttttattaaaaatacctgttgttaaaatgaaataattatcctcaatccaatatcgcgtgttcataattccgacaatttgagaaatgtatgatattaaaaagaatacaaatacaatacctatccataaatatgattcgggattcgtataatcaaaatctttcaattgaaagataatgaaaataaaaaagacgactatgttttgtttgatagcattgattatgccattaaaatatgaaatcggatgtaatttttgaggttcagacatcactttcaacccctctcaaattcgacatagttctcgcttcgattattttaacatcgtcatgagacatcatcggtaaataaatagtatgacctgcagtcataaatccaactttatacaaattaagcactttactaattggattagatttaatcgacaagtattgtaaacgttcaattcgactcgtttcttctttatatataaaaaatgatgtacgatattgtacacttagttgatcaactttataaaagcgacaatgatattgccataaaggcttaataaataattttaatgtactcagagcacctaaaaccaacaaaatataaagtaagtaatgtggccattcaaatcttaaccatataaaataaaaaatgacatacacagctacactcaatataaattctaagccattcgtaatgtagtaatacaacaatgctgacttaggactcttagtcaacttagtataatctgacataacccctctccccaaataaaaaattatacggatttataatctatttcattttatttttatatgatgataattatagcatatggaatatttcatgctaatttattcttcctaaaggtacatctaaaaatttaattaagcagaaagtgcttgaattgctaaaaagacaccatgttataattttatcaacatgatgcctttcatctataatcaatctttcatcttatcaagagcgatatttagttcaagcacattcacataatcatttgttaacacaccacgctgcttacgatgttgaatcaagtcggccactcttgaagtagatacatgacgagcatcagcaatacgaggtgcttgcttcaatgcattttcgaccgtaatatgcggatctaagcccgacccagaacttgttgcagcatctattgttacatttgaattcccaaatttaacatgatgtttcatgcgtgctattaattcggtgtttccattcgattcattacttccacctgaagatacgccgtttttatataatttttcaggattcatattataatcaactgcactcggtctcccgtgaaaatatcgtgtctctgtccagtgctgtccaatcaattttgatccaactatacgattgtcatacgtaattaaactgccatttgcttgttgataaaaaaatatttgaccaattaacgtgatagctaacgggaataaaaatccacataataccatagttattatcgttaaacaaatactatttcttatcgtattcatggtacaggctccttcctctttacacaaaaaattgtacaatcatatctattaatttaatgcctaaaaacgggacgattaatccacctaatccataaatcaacatattatttataaagattctatcaatgctgtaaccctttacttttacacctttcatggcaattggaattaaggcaacaatgattaatgcattgaatatcaaagctgatataattgcagatttaggtgacgataaatgcataatatttagtgaagtcatttctggaattgttgacatcattagtgcaggtaaaattgcaaagtattttgctacgtcattagccaaactaaatgtcgttaatgcacctctcgtcattaataattgtttgcctatttttacaacctctattaactttgtaggattcgaatctaaatcaattagattagctgcctctttagcactaattgtccctgagttcatagctaatcctatattcgcttgtgctagcgcaggtgcatcatttgtaccatctcctgtcatcgcaacaatatggcctttcgcttgttcatctttgatgactttaattttatcttcgggtttacactctgcaacaaatctatcaaccccggcttcttttgcaattgtagctgctgttaaagcattatcacctgtacacataactgtttcaatccccatttttctcaattcagtaaatcgttctacaagaccatctttaatcacatcttttaaataaatcacgccaagcatgacattgttttcaatgactattaatggtgtgccacctttactcgatacatccatacagagagactcaatgttaagaggaatattgccttgttgttgtttgacaagatttatcatactattaggtgcacctttgaataccgatatttcatttgtaatgattccgctcattctagtttcagctgtaaaaggcttatatgtgccatcaatgtctttaggcagctcatttatatacatctgcttcgctaatcgtacaatactttttccttctggcgtatcatcgtagattgatgacatataagcagcgactatcaatttttccagcatttgttgattcactggtaaaaattcactagcgattcgattgccataagtgattgtccctgtcttgtctaaaatcattacatcgacatctccacatacttctacagcacgcccacttttcgctaatacattgaattgagtaacacgatccatgcctgcaataccaatcgccgataacaaaccaccgattgtcgttggtattaaacatactgttaacgcaatgagcatcgcaataggtaaaattaaatgcaggtaagatgctattggatataacgttacaataacgactaaaaatataattgttaacgttgttaataatgtaaaaagtgcaatttcatttggtgttttatttctttccgccccttcaactaaggcaatcattttatctaaaaaagatgtacccgcttcactctcaacacgtatttctaaccaatcagatgttacaagtgtaccgccaatgactccatcaaaatcgccacctgattcttttatcacaggtgcagactcaccagtaattgcagattcatcaacggttgctaatccatttattacaacgccatcagcagggattgtttctccattttctacccgaatattttgtccggcttttaactctgtggcgttcactatccgatacgcaccattttcttctatcaatcgagcagttaaatttgattgtgcttgtcttaaactatcagcttgcgcttttccacgaccttcagcaaaggcttctgaaaaattagcaaacaatatagttattaataatatgataaaaattgtaatcaaataacctcgcgatagatagctagttccaaatatgtcaggaaaacatattaatatcaacgttaaaaccattccaacctcaacgacaaacattatcggattttttattaattgtttaggattcagcttataaaaactcattttcaaagcttctatcaccattgtttgattgaaatatttatttacatgatgcattttttccatccctttactttattttaaagttaaaaattcaccaataggaccaagtaatagtactggaataaatgtcaaaccacttagtaaaacgataaatacgattagtgatacgccaaaataaggtttatcaatcgctattgtatatttatcttgatggtatgattttttattcactaaacttgatgcaatcattaattgcaaaataattggtatataacgagaaagcaacataatgattcctgtagagatattccagaatgttgtatcatctttcagtccttcaaaccctgatccattgttcgcagcagctgatgtcatttcatacataacttgtgaaataccatgaaaagacggattcgttatactttcacttgctccaggaatcataaaagcaagtgctgaaaatactaaaattaaaattgggtgtatgagaaagactaagacaatacatttcatttcacgggcgccaattggcatatttaaatattctggtgttttaccaaccaccaaactgcatataaacaccgtcagtaagacaaatatcaataaattcatgagtcctacgccttcgccaccaaatacaacatttagcatcattaataccattggtcctaatccacctataggcgttaagctatcatgcatgttattaacagaacccgttgtaaatgccgtcgtaataactgtaaatagtgctgacaaacctgctccaaaccgtacctctttaccttccatattcggtccataaatgcctaaattcgctagtattggattaccacgatactcactccacatagttaatgtaagaattgctataaaaatgaaaaacattgcgacaaataatatcaacgcatgacgatgtactcgtttaccatgtctacttaacatgcgaccaaataagaacaacattgacataggaagtaacatcatactgcccatttctataaaattgctccaaatatttggattttcaaaaggtgttgcagaatttcctgctaaaaatcctccaccattcgtaccaagatgttttattgattcaagtgatgcaataggtccaaatgcaatatgttgaatatgtccgcttaaagtccgaatcattaaattagcatgcaacgtttgtggtacaccttgagtcatcaataaaatactaattaaacatgataatggtaaaagtactcggacaataaaccgaacaatatcttgataaaaattaccaatgatattagttaatccagttaaacgtctcaacatcgctatacaaacggcgtaacctgatgcactagatgtaaacattaaatatgtcattacaatcatttgcgttaaatatgtcacatctgattcaccgttatagtgttgtaaattactatttgttaaaaaagatattgctgtattaaacgctaaatctatcgattggtttaaaatatgatttggatttaaaaaaagccattgctgaactattagcaatacaaatgttataaaccccataaatccattaaatgccagaaaatgtttgacatatgttttagctgacatgtgttctaaatctgtgccgataattttaaaacacatattttcaaatctagtaaatattaaatctactcttgacgattgcaccaatgctacgcgatatagatatccactaaaaacatacgtaatcataaccatcattgttagaaacaaaattatttccatgataaccctcacttaatatatttctaaaatttttcactacgaattaaggcataaaataaatacaaaactaatgcaataactaccagtaataaaacgatgagcattgccataacctccttacaacacaacaacatcgtaacaacttgtttatgagagaaatattaattttcaaacttagttattaagaaatcattaagatgtgtatgcagaaataaattttatagcatttaattgtgaagaatattatgatattgctatcgaggtgaaggttatgtcaaacactgaatcgctaaacataggaaaaaagcgtggatctttaacaatttacatcggttacagtccaggtgttggtaaaacatttgagatgctttcaaatgccattgaactatttcaaagtaacgttgatattaaaataggatatattgaaccgcatcagcgtgatgaaacaaatgcattagctgaacaattacctaaaatcacaaccaattttactaaacatggtagtcatcattttcaatatttagatgtcgaccgcataatcgaagaatcgccgacaatagtacttatcgatgagttagcacatacgaatatttctagagatcgtcatgagaaacgatatatggatattgaagaaattttaaatcatggtatcgatgttcataccactttgaacattcaacatattgaaagtttaagtagtcaaattgaactgatgaccggtgtacatgttaaagaacgtgtacccgactatttcataatgagcgccgatgtattagaagtcgtagatatctcacctgaacaattaattaaacgcttaaaagctggcaaggtatataaaaaggataggctagatgtagcatttagtaatttctttacgtatgcccacctaagcgaactgcgtacattgacgttaagaacagttgccgacttgatgagtgataaagaaaaagtccgacacaaccataaaacgtcactcaaacctcatattgctgtggcaattagtgggagcatttataatgaagcagtaattaaagaggcattccatattgctcaaaaagaacatgcgaagttcactgctatttatatagatgtattcgaaaaaaacaggcaatataaagatagtcaaaagcaagtgcatcaacatctcatgcttgcaaaatcattaggagcaaaagtaaaagtagtttatagccaaaccgttgcattaggattagacgaatggtgtaaaaatcaagatgtaaccaaattaattatcggacaacatattagaaataagtggcgagactttttcaatacacctttaattgaccatttaatgtcctttgaacatagctataaaatcgaaatcgttccaatcaaacaaatacctgttgaattgaaaatgaacaaatcaccctatcgtcctaaaggcaaacgtttcgccatagatatgttaaaaatgattttgattcaaataatttgtgtaatgatgggactgtggatttatcaacttgataagcatgagtctagtacgattattttaatgatttttctcatcggcatcattttattatccatttggacgcggtccttcatcattggctttttagcagcaattattaacgtatttgtttttaattatttttttacggaacctagatatacatttgaagtatatcgctttgactatcctattacatttatcgttagcattttaacaagtattttaacgagtgctttattaaaacaaattaaattccaatactccattactaaaaagcaactttatcgtacagatttattatttcaatttaatgattcgattaaacaaacttatacagttgaaaacttactaataaatgctggataccaaattaatcaattattgcaacaatcaattactatatacgttatcaatcaatcgaaagtaattaaaacaataccattgcaaaaccatatcgataatacgactcaacagcatgaacaagcattaagctgggtaattaaaaatgaaagacaagctggtgcaacaacagatacatttccaggcattaataaatggttgataccaattggcacatctccgattaaaggcattctagccattgattaccaaagttctcaagtgattaatccatatgatgcatcaatattagaatcaatgttaaatgaactttctctcgccgttgaaaatgtgacgttacttaaacaaacgagagaatccatgttacaggctgaacgtcaactgacacattcaaattttttaagatcaatttcgcatgacatacgtacaccgttaacaacaattatgggaaatttagatattttagtatcacatagtaaagatatgtctatcatagaaaaggaacaattacttgtacatagttttcaagaaagtcagtatttatatctattagtgacaaatattttatcattaacaaaattacagtcatcaaatgttcagataaaattgcaaccttatctcgttagtgaattagtagaagaaatcgatatgattttagaacgtcgccatttaaaaaagcgtataactgtatcatcctccgtaaatttacagtttatacacattgacagtaagttgattttacaagctttattcaatttgattgaaaatgcagttaaacacacttctactgacaccaaaatcaatttatctattcgttatgctagctatgaacaaatcgaatttgccgttatagacgaaggacctggaattagtttagaagaacaacaaaagatattcgagcctttttacacaggatcaaataaatattttaaagataaccaaaaagaaagcatgggactaggcttatatttagtacagactatcctacacaaacatcaatcaaacttacaatataaaccgaaccaaccacacggcagtatattctatttcaatatatatacagactttaacgaaggagacgtataatgcaatctaaaatattgataattgaagatgatcacgcaatcacacatttacttgatgttgcattaactttagattattacaatgtaactacagccgacaatgccacacaagcacactttaaaattcaaattgataaaccagatgtcattttattagatttaggtttaccagataaagatggattatgtttgatttcagaaatcaggcagcatactgacattcctatcattgtaataagtgcaagacaagaagaacaaacaattattcaagctttagataacggtgcgaatgactatatgactaaaccttttaatgttgatgagcttcgggcacgaatacgagtcatcgagagaatcgctaagtcacatcaagaaactaacattgtatttactaacggtttgctaagcatcgactttggctccaaatctgttgttattaataatcaggaggtacatttgacgccaaatgaatttagcttgttagaactattgtcaaatcataaaggaaaagtactcacttatgagatgatattaaaacgaatatatggctatgttaataagactgaaatgcctagtttaagagtgcatatgacatcattaagacaaaaactttcacaatgtcatgaggacgcaaaagatattattaaaacacatccacgcattggttatcaaatgttgcagtggaaagagaaataattaaataaaaaagatcgctgccattaaacgaatgattggcagtgatcttttttatattcaacttattatttatcgcgcactagcgtcagcaaaaagccctattgttttttataagaacatgatactgaaatttcataaagtttatttatgttcgattattcttaatttaagtagttgttatattctagattcatatttatatttacacagaatgatataaccgcatacagatctcaatccaattaaatatttaacctttaaaacgttagtactttgatatctacagagaatcaattattgaaaacaaaaaggttctccaccaaatgtggtgggtatataatttaaagaactattttaaattacaacttttagagtttttattattaggcggccagtccattattgggcttggttgtcttctttttttctcctttgtataagctgaaaatcatcattatacgtgctttaaagttgttgaaatttctgtaaccaaaagaaattcgcttgattaattttatcttattattaattccttctatagcaccattattaaatgctgggtaataaattgtatttcttaacatcctttgatgttttctataatatttaaccactttccatacacctttactcacagactttttactaactgaatttaaacgattaataaatttaggccaattacataaccttagatcttttcttaatccttggacaagttcgtaggagcgtcgtagtatatcgtcttttgaaagcatgaattctacaatgtcagatgagcgtttataagccttaaaagatttattccatctgtatttactaaatatggttttactagtatccatcaatagaactttccagttattcttaaaaattgtataattaggtccttttttattacggtattcattcataacttgtacacgatacttattaagttccctatttaaatgttgaacgatatggaatctgtcaaaaataatagctgcattaggaaataggtcgcgaaataatcggacatagggttcatacatgtcaatagtaaccgtcttaacttgttgtcgattttttaaatcgaatcgctcgaaataggcacgcaagaatcttgtagttctattttctaaaatatctataacatcatgagtatcattatctataaaaatgaaactcattgatccagttacatttttaacgcttttaaattcatccatagcgatgtgttctggcaaacaattaaacggtttaattcgtaatgaattagccgctttagttctaatacgacttacagtagatggagagatacagttatcttctgcagtatcaatctctgttttaactttagtagcttcttctataactttttgagtaacacatcttgagataaaacacgactcatcaacaattgacgttttagcagtaaaagtgccattgcattctaagcatttaaaacgttgtttagctaagttgaggtatgtgttatacccttgagttttaagtaaagtaatacgagaaacacgcttaccatgtttatgaatttgtccttcatttttaactccacaacaataacaggccgaaggcttatacgttagtacagcattaaccactgttgctttttttcctttgataatgacgtcaatttcttggtttatatattttatattttcatcttttattcttagtaattctaaggtatcattacacataggcgcacttgtctcctttagtttgggtttggtcactttaaattatagaggcaattgcgctttttgtgtattaaaaaaagcaggaagttttaccttcccaccataaaagatgaagaaccaacaaaaaagagctcaagacattacatctttaagctcttaatctataaattatttttgatggtcagcaaatgtgcgacctttcataggtctgcttccaccgctgctcttctctttacggtcgaatttttttgtacttttcttcttacttgagtatccttttgaacgtttactcttactgtcaaatttaggattaccacgcttactatttctgttacgagaaccgcttggtttaccattacggcctttgcgagataatggtttttcaaaagttaattgaacttcaacttcatcgttcgcttctactaactcttgtaaaagtgcagcaactaaatcaacatcgttatattcatttaacaactctgtagaaatgcgtttcaagcgtgattctgactctttagacatccagttttcaactttttctttgatgtcatcttcacgtgcttgaagtacttctttacgatgaggtggacgaagtgcactcatttttctaccgtttgcatcttcaatttgtctgatataatccatttcgattggattaacaaacgttacagcgataccttctttaccagcacgacccgtacgaccaatacggtgtgtatagctttcagtatcttgaggtatatcaaagttataaacatgactcacaccagaaatatctagtcctcttgctgctacatcagtagcgactaaaatattaatttggtcatttttaaatttctttaatacttctaaacgtttcgcttgtgtaatatcaccatgtaagccttcagctttatatcctttagaaatcaaagcacttgttaattcatcaacacgacgttttgtacgtccgaatacgattgctaattcaggttgatgaacatctaggaaatttgtaaatgtatcaaatttctctaattctttaacaattgtatagaattcttcgatttgtggatcagacatttcattattcattgtcttaatgatttttggtgatttcataaattgttgtactaaagcttggattgctttaggcattgtagctgagaacaacattgtttgacgttgtactgctggaattttatccataataaatctcatatcatcgatgaatcccatattcatcatttcatcagcttcatctaaaatcaaagtatgaattccgtccgtttttaatgtgcgacgatttaaatggtcgataacacgcccaggtgttccgactacgatttgtgggccttttttcaaggctttaatttggcgttcgataggcataccaccgaatacagtaacaacttggacaccttgtccacggctaaattctcttaattgttcagctacctgcattgccaattctcttgtaggtgctaaaatcaacgattgaactccttgtttccctactactttctcaattaaaggaataccgaatgctcctgttttacctgtaccggtttgagcttgcccaaggatatcaattccttgtaacgcataagggatactgtctttttggataggtgtcggctctttaaatcccattgattcaagtgactgaaccgtattatccgaaatccctagttctttaaaattttgcaaaataattctcctttttacctgtttatttctcaatatacttttgcatataagttcattaatatttcatcaacttctatatagtaccaccaaaaaaatttaatcgcaataaagcaatttgcgaatatttattagaatcacattaattgattgtcatatttttgtcaaaaagctagcattagataagatgtaagcgttacgcatcattcgaataatcattataaaaaattttttataaaatacgtatatcgttaacattccacaacaaattttactgaaacacatgtgaaattagacattataatactacatctttttgtaaaacattatataaacattcaaactacttcctatataaagtgtgtacatagaattaaccttgatttagtttcaaatttatagatttaacataaaaagaaaaaggcaattttgtatttacacacaaaaccacctcttctttgtaatcttttagtattaattcaaatcatttttataagtaaaaggtcgctcgactaatctctatgaaattaaagcatttacaacttcttctaacttcataccacgtgatcctttaactaatacacggtcatgcgcttttaaatcgcttgttaaaacttctatcatatcgtctttagaattgaagtgttgtgctttttcgacatgttgctggcccgaatcataaatatacttcgcttcattaccaaacgtatacaacacatctatatgcttttcttctaaataattacctacaccgatatgcatttctttgctattttcacctaattctaaaacatctcctaaaattagaatgcgacgccctgtcaaagtacccagtgtatcaatagctgctctcatacttgtaggacttgcattataggcatcatttatcacagtaatatcattttctaatgtatgttgctccatacgcataccagttaagctgacattttttaaattttgatagattgtgttatatgtcaaacctaattcatgaccaaccgcaatggcaatcgtcgcatttttcatattatgctttcctaatattggcagatcgtaatgttctttattattaatcgtaaatgaaatacctgtagtatctctatcatcaacagaacaaactaatgcattatcagtagcaacaccaatactaatacattttgcattttcaacttctttaacatgtggtttcaataatggttcatcgccatcatatataaacgtaccattatcttttagacctattgtaatttcagatttagctttagcaatcccctcgcgcgaacctaaatcttgcatatgtgactcaccaatattagttataactgcaatatctggttgagcgaggtttgacagaaattcaatttcatggaaacctgacatccccatctccaatattgatatttcagtatcattatctaattccaaaatagttaaaggtaaaccaatttcattattgtaattaccttgcgttttcttaactttaaattcggtatgcaatacactttcaatcatatctttagtcgttgttttaccattagaccctgtgacggcaattactttagggtttacatgtctcaagtaagcttgtgccaattgttgtaatgccgttaatgtgtcttcaacccatataataggcccgcttacattttcatctataggtgtccctctttgataaaaagcagccccagcaccatcttgtaatgctttagagacaaagcgatgaccgtcaacattttcacctttaaatggtataaataacatatttttagaaattgctcgtgaatcaattgtgactccatttatctcttgatttaaaaattgatcttcaatttcacaaggaatccatgattgaatttgctttaatgtaacattaatcataataacaacctcagttagtcaattttgtatttatttttctgtttatcctggtgacgttctttagcaagctcgataagttttgtaatcaattctggataagataagcccatattttcccataactttggatacatactgaaagccgtaaatccaggcattgcatttgtttcattaatatatatttggttgtcttctgttacaaagaaatcagcacggactaaaccagaacaatctgtcgctttgaatgcctctaatgccatatttctaagcgttaattgaacatcttcgtctaagtcagctggaatttgtaattgaaccttaccatctttatattttgatttgtaatcgtaaaacgcgacatcttttacgacttcacctggccatgtcgcttcaggatagtcatttcctaaaactgctacttcaatttcacgtgcgttaacgccttgttctataacaagcttacggtcaaattggaatgcttctttaataccttctttaagttccgcttcattattacatttactgatacctacacttgaccctaagttagcaggtttaacaaagactgggtaatttaatttatcatttactaattttaaaatgttatgttcatatttttcatattcagaacgtaagaaactaatataaggtaactgtggtaaccctcgatgttcaaataattgtttcattacaagtttgtccatagaacttgcagctgacaatacaccatttcctacatatggtacatccaaaacttcaaaaagcccttgaatcgtgccatcttcaccattaggaccatgtaataatgggaatactgcatcgtatggttgtcctgaactactttctttcaatagctgtgaaatctcaagcgcctctccattttctaaatgaagctcatcagtagatttaatttcagctgtaatattattttgctttctccaatcaccatcattggtaatataaatgatatcaacatgatatttgtctttatctattgcatttaatacattttgtgctgtcagaatcgatacttcgtgttctgcacttttccctccaaaaacgatacaaatattttcttttgtcatttcgttttcctccaatgatatatcagggtttgctaccttaatataaattaatattgatttagtcctattgttaattgatttattcgcatctttgaatcttaatagtatcacattttaatgctattttgcattttaaaaacgaggacttatgtgtctgtatctatgttgattcatttataatcagaacaatattcccttctattttattcctaattcaaattgaaatctatagctgatatcactgtgatattctagctaatttttaaaaagtcatgtaaaattgatataaacattagtgagtataaaaggagtttgcaatgaattattcatctcgtcaacagccggataagcattggcttcgcaaagtagactgggtattagtagccactatagctgttttagcaattttcagtgttctgcttattaactcggcaatgggcggtggtcaatacagtgctaatttcggtatcagacaaattttttattacattttaggtgcaatttttgcaggtatcatcatgtttatttcacctaaaaagattaaacattatacatatttattgtatttcttaatctgtctattattaataggcttgctcgttattcctgagtcacctattacacctattatcaatggtgccaaaagttggtacacgtttggccctatcagtattcagccatctgaattcatgaaaattattttaattttagcattagcgcgtgtcgtttctagacataatcaattcacattcaataaatcattccaaagtgatttgttattatttttcaaaattattggtgtctcgttagtaccaagtattttaatattactgcaaaatgacctaggaactacattagtattagctgctattattgcaggtgtgatgttagtaagtggtataacatggcgtatcttagcacctatctttattacaggtattgttggtgcaatgacagtcattttaggtattctatatgcacccgcattaattgaaaatttattaggtgtccaactgtatcaaatgggacgaatcaattcatggcttgacccctatacatatagtagtggtgatggctatcatttaactgaatcacttaaagctatcggttctggacagttactaggtaaaggatacaatcacggtgaagtttatatacctgaaaatcatactgactttatcttttcagtgattggagaggaacttggctttatcggttctgtcatattgatcttaatatttttatttttaatcttccatctaataagattagctgcgaaaattgaagatcaatttaacaaaatctttatcgttggtttcgtcactttacttgtgttccatattttacaaaatattggtatgacaattcagttgttaccaatcactggtattccattaccatttattagttatggtggtagtgcgctatggagtatgatgactggaataggtatagtcttatcaatttattatcatgaaccaaaacgatatgtcgatttataccatccaaaaagtaattaatttaaactattttgagtttcaaatatcataacttttcaagatgacgttatatagtctatttacgtcgtcgatttaaaatgtcatatatagatattactcgataataacaatccctctttgaagtacacattgtaaaatgtacactctaaagagggattttgttatatagtacttgctttcattttagtaaatccagtcaaaaaagctatcatcgaatagtccgacgatagctttaacggtgtgtgattcacaatcacagtcaattattttaattcgtgacttactttattagatgctggcaaagtattaataatgtctaaacgagatttagtttttttaatattcacacctaatgatgacaatagtttgactacattttgaatcttttcaggacgtttcattattatcacctcgtttggatcgctttcaatattatcttaccctattcgacatacctttactacatcatttacaaaatttttaatttattttcaaaattaaaatctatagcgcactctacattataccctaaaatacaattttgtatccttcatcatagatttctttttcaatactattcaaatttgctggtgtctcatacgatacagttacttgaccatctattatattaatattcacttgatgaacacctatcatatttgaaatgcgttctgtcaattgacttacttgttcttctgtttcaattcccgctgtgtaaatcgtattttgatgtatcatcttaaactcctttagtctttaatcaatttttgaaaagtcactaataactcttccattgcctcttcctgagcaccttgattaactttattcataatacaacttttcatatgttgttctaataactttatcgcaacactgtttaacgccgaacgtgtcgctcttatttgcgtaaggacatcatcacaatagacatcttcttcaatcatgcgattaatcgctctcacttgtccttcaattcgatttaaacgtgatttaagattcgtttttatttgttcagaatgatgtgcattatcttgttcagtcatagcattcactccttcatttacattccttactatactatatcccataaaacacaacgtcaacacaaagtgtgtttttcaaactaaattgtcatgatatttaaattgcttcatgatacaattaataagatatactactcgtttaagattttcgatgggaggtttcaaatgatagagttattatccattgcactcaagcattctaatattattttaaattcaatatttattggtgcatttattttaaacttattattcgcctttaccattattttcatggaaagacgttctgccaattctatctgggcttggttactagtcttagttttcttgcctttattcggcttcattttatacttactattaggacgacaaattcaacgtgaccaaattttcaaaattgataaggaagataaaaaaggattagagttaatcgttgatgagcaattagctgctttaaaaaatgaaaacttttcaaattccaattatcaaattgtaaaatttaaagaaatgattcaaatgttgttatataataacgcagcatttttaacaacagacaacgatttaaaaatatacacagacggccaagaaaaatttgatgacctaatacaagacatccgtaatgctactgattatattcattttcagtactatattattcaaaatgatgaattaggtcgtaccattttaaatgaacttggtaaaaaagcggaacaaggtgtagaagttaaaattctttatgatgacatgggttctcgtggactgcgtaaaaaaggcttacgcccgtttcgcaataaaggtggacatgctgaagcatttttcccatcaaaattacctttaattaacttgcgtatgaacaatcgaaaccatcgaaaaattgttgtaatagatgggcaaattggatatgttggtggttttaatgttggtgatgagtacttaggtaaatcaaaaaaattcggctattggcgagatacgcatttacgaattgtcggggatgcagtgaatgcattgcaattacgatttattctagattggaattcacaagccacacgtgaccacatctcctatgatgatcgttatttcccagatgtaaattctggtggaacaattggcgttcaaatagcttctagtggtcctgacgaagaatgggaacagattaaatacggctatttgaaaatgatttcatctgctaaaaaatcgatttatattcaatctccctatttcatacctgatcaagcctttttagattctattaaaattgcggcattaggtggtgttgatgtcaatatcatgattcctaataaacctgaccatccgtttgttttttgggctactttaaaaaatgcagcatccttattagatgccggtgttaaagtatttcactacgacaatggctttttacactcaaaaacacttgttatagatgatgaaattgcaagtgtgggaacagctaatatggaccatcgcagtttcacattgaatttcgaagtcaacgcttttatttatgaccaacaaattgccaaaaaattaaaacaagcttttatagatgatttagcagtatcttctgaattaacaaaagcacgttatgctaagcgaagtctttggattaaatttaaagaaggtatttcacaattattgtcacctatcttataaaatagaaatatgaggagtgtaactttaatgcaacaatcagacgtcattagtgctgccaaaaaatatatggaatctattcatcaaaatgattatacaggccatgatattgcgcatgtatatcgtgtcactgctttagctaaatcaatcgctgaaaatgaaggtgttaatgatactttagtcattgaactcgcatgtttgcttcatgataccgttgacgaaaaagttgtagatgctaacaaacaatatgttgaattgaagtcatttttatcttctttatcactatcaaccgaagatcaagagcatattttatttattattaataatatgagctatcgcaatggcaaaaacgatcatgtcactttatctttagaaggtcaaattgtcagggatgcagatcgtcttgatgctataggcgctataggtgttgcacgaacatttcaatttgcaggacactttggtgaaccaatgtggacagaacatatgtcactagataagattaatgatgatttagttgaacagttgccaccatctgcaattaaacatttctttgaaaaattacttaagttagaatctttaatgcatacagatacggcgaagatgattgctaaagaacgtcacgactttatgatgatgtacttgaaacagttttttacggaatggaattatcacgactagacattgaagttgtagtatgatgatgcgatgtaatggcgtgttgttgtggaagcttggtgtcatgccatgttactttgatgtgttgttgtgggagcttggtgtcatgtcatgttactttgatgtgctggtaccacgatgcgtcttgatgtagtgctatgatgtggcattgcggtgttatggtgttatagaccggtttggcgtcgatgccatgctactttgatgtgctggtaccacgatgcgtcttgatgtagtgctatgatgtggcattgcggtgttatggtgttatagaccggtttggcgttgatgccatgttactttgatgtgctggtaccacgatgcgacttgatgtagtgctatgatgtggcgttgcgctgttatggtgttatagaccggtttgatgttgatgccatgttactttgatgtgctggtgctacgatgcgacttgatgtagtgctatgatgtggcgttgcggtgttatggtattatagcccggtttggtgttgatgccatgccgttactattctatgatatgttgttgggacgttgcaatgtgtattatgccgttgtgatgttagtatttcacactgttacatgtattagtgaattactgtggaaatttgcgacatatactgctacactgatgaatcattgtgtcaagatgacattgcgatgaagaatgacaactctgttattaaccactttttacatactgaaatctcgttaatattatttcaaataaaaacagcagtaggatgactttcacatttgaaatcatcttactgctgtttctatttatcacatattgtataatgtgacactaagtttcgctattgaagcgaaaaataatgtgcgccctataaagttaaaattatcttcaacttttagggtgcacattatttggacttgctaaggttatttctttttctttttagacactacttgtgtgtttttgccttttttattgctgccgccgttgtgctctctttcatacgcttcaatgaaaggttgtacttcttttttagcgactttttcataataaatgttcgcaaagtgtgtttgaactacaaggaatgccgcactgacagaccagtacaaaccaagtgctgatgctgagcttaatgaaatccagataatcataattggtgaaatgaccatcatcatgtaacccatttgccgttgttcgtctggcatcgttttacttgatacatatgcttggataaagtataaaacaccggcaataattgtaatccaaatatcaggacgtcctaaatcgaaccataagaagtgtggatatttaaacaaaccatctacaagttggtctttaagtacaaagtataatcccatgatgattggcaattggattagcattggtaaacaacccaacatactcttaatcgggttcatgtcatactttttatatacttgcattaattcttggtttgcagccattttttcttcttgtgtacgcgcacgtttcactttttcttgaattttttcaacttctggctttgcaactttcattttttgacgcatcatatgactatttttatagtttgacaacatgaatggtaataaaataatacgaattaccaatacaaggataataatagctaaaccataattgtcgtttaataagttatttcccaaccaatccaatacatttttcattggatctacgaatgtattgtagaaaaacccactacgtttttcaggtttagaatagtcacaaccagccaaaaagaccataatacctaaaaataatggtagtaacgcttttttcttcatttttccacctctatcattatattcacataggatttattctatcacattaatgagtacgtatgaaacaataagtggaaaaatttaactaattattaaaaaaatctttgaatcgattaacagtcttttcaatattttcacttttagaaatggctgaaatgactgaaattccattggcacctgcttctacaatcggcgccacattattagtattgataccgccaatagctacaatcggtagttgcggattcatttctttaaacgttgcaatcatttctggacctactggtatatgcgcgtcatgcttcgacggcgtaggatagattggtccaacacctatataatcaacatgagttaaatcagattttgcatactcatctaaatcactaatactaagtccaataattttatcagtgaaatattgtgctatctctttgactttcgcatcatcttgaccgacatgtataccatccgcgttaatttcttttgccaaggatacatcatcattaacgataaaaggcacatcatattgatgacagagatgctgtaattctttagctaatacaagtttatcgtttccttttaaagctgattcacccttttctcgaaattggaaaagtgtaatccctgcctttaatgctgcttctaatacttcatgaatagttcgatgactcggaacatcggaggtcccacaaataaaatacacatttagatacgattggttaaacatattattccacctcttgaatacgaatccgttgttgataggttgtttcatttaaatgatataacgtatcaagcaacaatggtgaaaacgtaccaggaccaccacaattttcattttcagcagctacctcagcagcaatattaaatacgcttaccgcttcaattaacgcttctatgtctggttctgtttctctaaataaaaatccagcaataacgcctcctaataaacaaccagctccagttactcgtgctaataatggagatccattagctaatacgatggctttattatcttgaacaataacgtcctctttacctgtgattactattgcagttttatatattgcgtaagcctttttcgctattgcaaccgcatcaagattagcatcactatctgtacctttcatagttgctgtatcatcaatcaacgctaatatttcagatgcattgcctttaattactgatactttcgctgatttcaataataatttacaaaattgctttcgatatgtagaagcaccaacagctacagggtcaaatacaataggtaagcctgcctcatttgccgtttgagcaatcgcaataatatcttgttcattttgtgctgttaaagtaccgatattgattaatagcgcttgtgcaactttgtaaaattcttcagcttcttcgggagcttcactcatggcagggctcgcaccaatacttaataaaccattcgctgtaaaatttttaactacatcgtttgtataacaaattgttaatgggttttcaatacgtattttatttagataattcatcgtctaatccctctttctttaaatatgcaaaatgattcactggtcctctaccacggccgatttcaggtgtatattgtatactcattgaaataaactttttagccttgtgtacagcctcaaataatggtctaccttttgcaagttctgccgttataactgctgaaaatgtacaccctgttccatgcgtatgttttgttttaaatcgttcattttcaaatgtttgaacaccttcgttagtaaataaataatcttttgctatatcagtatcatttgaatgaccgcctttaatgatgatacctttactaccaatctcattaataaagatgcggccagcctgcataattttttcttcactatcaatggttagtcccgttatttcttcagcttctggtaaattcggtgttactacgtcagctaatggcaataacgtatgctgcaagttttgctttgtgtcattatccattaatgaatcaccgcttttcgccaacataacaggatcaattacatatggaatagattcatgttgcattaaataatgacgaatcgtttccatagtatctgctgtagcaatcatccccgttttaatagcatgaggtaaggtatcattgaagacactatcaagttgttcatctacccattgatgatttaaattatgaatatgttgtacgcccaatgtattttgagcaacaatacttgtaacgacgcccataccatatacaccacatgaatgaaatgattttaaatcagccattacgccggcaccacctgttggatcagtacctgcaatggttaatgctattttaggtttaatcatttacttttcctccaaattcccattgttctagtgtcatagccatattgaaaaatcgacgctcatgtatgcaactttctaaaaatacttgctttacttgttccaattccttgtcagacattgattcggctaatttattcattaatgcctcaaatacgttaattatgtcatccatttcagtactataaaaatcaaaccattttgccgtatctttttctctattaagcttatgatcactttgagagcgcttagctaattctgcataaatatatggacaaggtgccattgcagcaattgtataaatagcattttcacgactatgcgcttggaaatacatatgttttatgtaatggtcgccacttggaggccaaacttttgttttaatgatttcttcgtatgattcaccaacaatttgcgctaaaatatcatgcgcaagtacttcaccttcaaccataaattctatttgctctactaaaaattttacgtcattcatgctattcatttttggaattaacaaagcatataagtttgtaaattcttttaaatacgcagcatcagcttttaagtaatggcgtaatgcgtcagctcctatatctccggataacatcttctgaataaagtcatcctcataaatatcattaatgattggctttgcagcttggtacaatttttgtgaaaattccattgtaaaaaatcctccctaaataaaaaaactacttccaacatgaaagtagtttgatggcaatgttgctatactagccccatcacttcaataactactttcctacgttggtactaaccaaatcaggtcataagggtctgaacaattcatctcagccatatcattaggctcccctagtagttccttagtattcaattgcaaattaatcttagcaaacggtttcaacattttcaattattgttgctcagttgtattattatctttaaataataattctataatgacgtatatttgcgaaataaaaaagaccggaacatatcgagaattccccgatatattccgatctaaaagttacttatataactattgattagctatgcataaatggcttatgcagtaacccaatgtccagcgccaccagtgttatataattttactgctgcggcatcttgaacactttcaggagcatttgctggtgatacacctttatatttagcaggtgctactgaatcccaagttgattgtaagaattgatacttaccagctgcacctgatgttggatttacagcatgaatattgccacctgattcacgttgagcaatttgttttagatgagcattcacatttactgatgaaccttctgatgcttttgattcagttggtgttgcagtaacttgtgaattgtttgatgttgatgcttgtggttgttgagtttgagcattttgtggtgcttcaacttcttgtgattgtacttgattagcttgaacagctgatggttcaacattattagttgcaggtgcttgtgcactcatgtttgctccattagcacctgttgcatggtaattccaagcaaagtgtgtaccatctgattcaaagtgataagtaaacccttcatagtcaaatgtataattataagccccagcttcaattggtttttgatttaatgtttgatcatttgattgcgccatttgcgctaaagatgctttatttaagtccgcttcacttgcatgggcttcgtgacctgcatttcctgctacgattcctaaacctactgctaatgatgatgcgagtaatgttttcttcataatcttaaaatcctcctacaagtaatttgtttctctaaaagttttacagagactactgtaacatctataaaatccgtgcaggttacaacaaaataaaaaaatagccttgttttttacacagtgattacaacgaaatcccccataatttcagatatgattctatcgagaattgtcatgacagtaaaaatgttttttatttgcaattttttatgtaatcgttttgcaatctatgtctattttctattagaaaaactacacaaaaagacgacctacacaacagtactagtcatgtaagtcgtttttaattgagtatatttcaagttaattagatctataaaaaatttaggatggattaaatgtatattaaggatgtttaggataattggatttaaatttctaataagtcatgattatctatattttgagagtcaatatctaaaatactatctgagagaatttcattattttgggatttaggggacataaattttattgtttcaacatataattcagtgacaaagtgtgtttgtccgtctttatcatactttcttgatctcatttgaccagttataccaaccaatgtaccttgattagtatatttttctatattagaagctaacttgccaaatgctttacagaataagtaatcacagacgatttctccattttcatctttataatttcggtgcgttgcaacacaaaacgttgcaatttttctatcctccttttcaaatatttgtgcgtctttcgtcagtctcccgacaattacgattttatttagcatgtagtgtgtgattcacctcctatgcctatatcttaattactagcttaaaaatggtcaaaatggcaaattttatataattaatagctatagcatctcgttatttgttatatttaaagaaattagtcatgaaatgaccttaaatcttctaaataattcaaaaatcataaatattaaactaatgggatgtgggaatatgaaaacttttaaagcagtaaggtttcaaattgtgaatgaacacggcagaattatagaatatgaattagaagatggcgtaataattaataaagaggaaagtggcacgggttggttgcttgaaattgtcatttctaatgagcattatgaaacatttaaggaatatcaagacaatgaacagttattggatattcgtgtcgtcatcacgcgtccagccaatgatccagctttatttgaatctactgtgaaaagtattaaaaattttaaaacaacaatgtctatcgtatttgaatgtcatatttacactttacgtcaacagtatgctgaaagtttattagaacaacttattgatgatggattatctggtgaagaattaaaaaaatcatttaatcgaatgatgcagtctaaaccaaagttaaaggatgaaaaattagaagagtaaaataaaaaacattcaaagattatgccaacacattaaatctttgaatgttttttttgttttattttacatcttgaattgcaaatgtaagttcacaactacaagcaagttgaccatcgacagtagctttagcattacctttaccgattggtcctttaattttagtgatttctacttccaacgttaaagtatcaccaggtactacttgacgtttaaaacgacatttatcaataccagcaaataaagcgattttacctttattttcttcactatttaaaatagctaccgcacctgtttgagctaacgcttcagtaattaatacgcctggcattaccgcatactcaggaaaatgcccttgaaagaatggttcgtttcctgatacttgtttaatagccacacaacgttgaccttcttcatattcaactactttatcaattaataaaaatggctgtctgtgaggtataatttgtttaatttggttataatcaaaaattgtttccatggttgaaatcctccattatattaatttactgaattaatcgttaatacgttcaatgtctgcacctaattgcttcaatttaccgtgtaagtcaacatagcctctatctaggtgcgttaattcagtaacgcttgttttaccatcagcaactaatccagctaaaattaaggctgctgctgctcttaaatcagtcgctttaacttgtgcaccttgcaattgacttttaccttcaagtttagcactacgaccttctacattgatattagcattcatacgtttgaactctgcaacatgcataaaacggttttcaaaaacagtttcggttacgactttatgaccatttgccgttaataacaatgccatcatttgtgattgcatatcagtcgggaatccaggatgtggtagtgttttgatgtctacaggttgtaattccccttcagcacgtacacgaataccatcttcttgatagtccaattcaacgcccatttcttctagtttatagactaaactcgccatatgttctttgattgcaccacgtacaaaaatatcaccacgcgttatagcaccagcgattagtaatgtgcctgcttcaattctatctggaatgatagcatgttctacaccatgtaatgattctacaccattgattgtaattgtgtctgtaccagcaccagtaattctaccacccatttcattaatgtagtttgctaaatcgacaatttcaggttctttagctgcattttcaattaaagtcttacccttagctaatgatgctgccataataatattttgtgttgctcctacacttggaaaatctaaatgaattgatgtaccttttaatccatctttagcattagcataaatattaccattttcaagatgaatttctgcgcctaaagcttcaaaacctttaatgtgttgctcaatcggtctacttccaattgcacaaccaccaggcaatgcaacaatagcatgtcctagtcttgctaaaagaggtcccataactaaaatacttgcacgcattttactaacatattcatatggtgcctcttcatttagagtctttgttgcatcaacgacaacagcattttcgtcctttttgtatgtaacgtcagcatttaaagttgttaatacattatttattgtttctacatcacttaaagctggaacattaactaatttactcggtttatcagaagctaataaagatgctgtcaatattggtaatactgcatttttagcaccttctactttaacttcacccgttaatttatttccacctttgattactattttatccatcgtaaatcctccacttagaactcctattactttacatttccctattttaaaattattttaagtcattatttaattatatctagttttgattacaaatcatagagttagacttattttattaaatattttacctgcgtcgagtattgtaacaaatctacaataaaattgcttactgcagtgcctaataaaatagcaacaaatatcatacacacttgtaattgagtggcgtatccttttttaaaaaattgatctaatctaattgattgtaaagcccaataggcaatacaaatacatacaacatgtaacactaaatggataactgcatattgtccgatataatccattttatcacctcataagattactgtattacattgtacatgaaaaatttaaataatgatacaaagtttaatacccgtttttagtaaagtttaagctaacttactatataattctttttacataaatatcataactataaaatatcttggtatgaaaaaatgtagataatttcaaaaaatgaaatgtcgactgtagatagtggtgaaggaaattttgattttagcaatctattagtgattgtaaaaaagtaaaactattcttgggagtcggacataaatcaatgtctagactctatagtgttgtatttggcagtagttgacggggccccaacataaagaaatactttttctttaaaaattagtatttcttatacatgagttttactcatgtattcctatttttaaatacacattagctgtgtttaatgataaagaaccactacatcataaatctttaatggttctttatcaattccttcccccctctcatgttttgtatctttaaatcaatataattcaaaaaagggtcgaagatatgaaatcacatcttcgaccctttatttactattttaattcagccacacgcaaacggttatttgctctctctaaagctctttcggctctatgaatatcagtattgtcgtcatcattttccaagtgagactctgctcttgctttggctaatttagctctttcaacatcaatttctcttgcagtttctgcagtctgaacaatgattgaaactttatcttttctaacttcaacaaagccatcgcttacagcaatatattcagttccatcgtgaaatttcacttttacaaagcctgtttttaaagcagctacagttggaatatgtccactcatgacacctatctcaccagctgttgtttgcataacaacgagttcaacattatcacgattgtaaacagaaccattaggagtgacaatatctaggtttaatgtattcattatccattcctcctaattgttatacttcaacacccatatctttagcttttgcaataacatcatccatgctaccaactaaacggaatgcatcttctggaatatggtcatatttaccatctaagatatctttaaagtttgcaactgttgtcttaacaggtacataagaacctttttgaccagtaaattgttccgctacgtggaagttttgagataagaagaattgaattctacgtgcgcgttcaactgtttgtttatcttcatcagataattcgtccatacctaagatagcaatgatatcttgcaattcacggtatttttgaagtgttgattgtacatcacgagctacttcataatgttcttgacctacaattgatggttccaatgctcttgatgtagacgctaatggatccacggctggataaatacccatttcagttaatttacgttctaagttagtagttgcatctaaatgggcaaacgctgtcgcaggcgctgggtcagtatagtcatcggcaggtacgaataccgcttgaatagaagtaactgatccttttgttgtagacgtaatacgttcttgtaattgtcccatttcagtagcaagtgttggttggtaacctactgcagaaggcatacgacctaataatgcagatacctcagaaccagcttgtgtaaatctgaaaatgttatcgatgaataataatacgtcttgaccttgttcgtcacggaaatattcagccattgttaaaccagataatgcaacacgcatacgtgcaccaggtggctcattcatttgcccgaataccatggctgttttcttaattacaccactgtcactcatttcgaagtataaatcgttaccttcacgagtacgttcacctacaccggcgaatacagaaataccaccgtgctcttgagcgatgttgttaattaattcttggattaatactgttttacctacaccggcaccaccgaacaatccgattttaccacctttaatataaggtgctagtaaatctactactttaatacctgtttctaaaatttgaacttctgttgaaagttcatcgaatgctggtgcttgacgatggataggatcgcggcgaacagaatcactaatttcttctttaaggtcaattgtttcacctagtacattaaatacacgacctaatgtttcgtcaccaacaggtacactaatttctttgcctgtatcttttacatccatgcctctttggacaccatcagttgaatccatcgcaattgtacgaacaacgtcgtcacctaattgcagcgcaacttctaatgttagttgtattgtaccttcttctttaggcacatcaataaccaaggcgttattaattttaggaacttcgttatgttcaaatcgaacatcaattacaggacccataacttgagttacacggccaattcccatgctattttcctcctttaaatattattcaagcgctgcggaaccaccaacaatttcagtaatttgttgcgtaatttctgcttgtctcgctctgttatattctaatgataagtcatcaataagttcagttgcattatcagtggcatttttcatcgcagtcatacgtgttgcatgctcacttgcttttgcgtctaatattgttccgtaaatcaaactctcaacatattgaggcaagattacacttaagatagattctttatctggctcaaattcataagaagacaaatgaccatgccccttactagaatcctcttgagataatggtaatacttgtctagatgtaggcttgttttcaagaacgctgacataatgactatagtatatatttaattcatcaatttcttcttcactgtataagtctatagcatggttagctagtgcttgaacagatttgaaagaaggttgatcaggtacgtctacttgagaatactcaatgtcataacctctattttttaggaaatcaacaccttgttgccctaaaactacaatactgtattcgctactatcttgatgtttcgcttcaatatcagtaatcaattttttaagcacgtttgcactatatgcacctgctaaacctttatcactcgtgataactaaatatccacttctagtaattttacgaggtcttagcattggatggtttgtattgctacttgcccctgcaactgcagtaattgcatcttgcattttatccatatatggtgtgaattgttttgtatttttttcagctctacgaagttttgaacttgataccatgttcatcgctttcgtaatctgcttcatttttttggttgattttattcgagtatctatttctttaagagaagccactatctcaccaccttatactaaacttgtttattattcagatttgctaaagctttttttgaattcgttaattgctgtgtcaaacttctcagcatctggtaagccaccagtttctctgatttcatttaacagttcagtagcatttgattctgcccagtggtttaactcgtcttcaaaacgtgtgatatctacaactggaatatcatctaaatatccttttgttaatgcataaataatcaacacttggtgttcgactggtaatggtttgttttgatcttgttttaagacttcaacggtacgtttaccacgttctaatttacttgcagtaaattcatcaaggtctgaaccgaattgtgcaaatgattcaagttctctgtatgacgctaagtcaagacgtaacgtaccagcaactttcttcattgctttaatttgtgcagatccaccaacacgagatacagattgtccggcattaatcgctggtcttacacctgagaagaataaatcagattgtaagaagatttgtccatctgtaattgaaataacgtttgttggtacataagctgaaatatcaccagcttgtgtttcgataattggtaatgcagtaattgaaccgccacctaagtcatcgtttaattttgctgctctttctaataatctactatgtaagtagaatacgtcacctgggtatgcttcacgacctggaggtctacgtaataataatgataactcacgataagctgctgcttgtttagttaaatcatcataaacgattaaaacatgtttaccgttaaacatgaattcttcacccattgttacacctgaatatggtgcaatatataataatggagaaggttcagaagctgatgctgctacaacaatagtgtagtctaaagcgcctgcttgtcttaacttttcaacatttgctcttactgttgaatctttttgaccaatagcaacatagatacaaatcgtaccttgatctttttggttcaaaattgtgtcaattgcaattgttgttttacctgtttgacggtcaccaatgattaactcacgttgacctctaccaattggtactaaagcatcaattgctttgatacctgtttgtaatggctcatctactgatttacgatccattacaccagtagcttttttctctactggacgtgttttagttgtgttaatcggtccttgtccatcaataggttgtcctaatggattaacaactcttccgattagttcttcacctactggtacttccatgatacgaccagtacgtttaacttcgtcaccttcagtaatacctgtatatggtcctaaaataaccacacccacgtttgactcttcaaggttttgggctaaaccaagtacgccgttatggaattctactagctcaccagccataacgtcatttaatccgtgaattaatgcaataccatcaccaatttgtaatacagtacctacatcagttacggacatttctgactcataattttcaatttgtgagcgaagtaatgcactgatttcttcagcttttatggccatctatgtcactcctctttataattaattaactcttctaaattttctttgtaattggacaagatcatttctaacactaccatctaatacagttgtgccgactttaactctaaatccaccaattaaatctggattaatttttgtatctacaataactttagataacttcgtttgttgagttactagtttgacaatcttatctaactcttcttgactcaattcatatgttgactcaattgttgcaaaatcttgattgtagtgtccgttatataagctttggaacgccttgaatacgtcagctattaatgagatatgtctattatctgctaacacgtacatcatatttttaatgtatggattaatgtcagtaaatacaccattaatcaactcacgacgttgttctgctgtttgagttggattactgtcaaccattttcaattgctcaattttatcttttactgcttcatttataactgttaattcttcattaatagtctctaaattatttgtatctaatgacacgtcaaataatgctttagcatacttgttagctacttttaccattatttatcgcctgcctcttttagatacttgtcaaccaatgctttttggtcttgttcagaaatttcttttctaagaactttagaagcaattaacactgatagttcagatacttgattattaatatctgcaatggcacgttctttttggctattgatttcactttgtgctgtttcaatcataccgtttgcacgtacgtttgcttcatgaataatttgttcttgctgttgacgtgcttgaaccttagcatcttctaaaatcttttgaacttcttcttgtgtttctttaagtttttgtttattttcttcttcaagtttctgtgcatttaacttagcttgttctgcgtcatcgatatctctgttaatatctctttcacgtttatccattacatctttcaatggaccccatgcgaactttttaagtaacgcaagtaacacgatgaaagttaggacctgtacaatcacagtaccccactcaacgcctccagctgcaccaagaacgaataagttagctgtttcagtcacgggttcatgacactcctttcattaaaataatcgctagtgttatatagaaaaaaacgacgaggttaggacctactgaatttatgcgataggcatggtgcattcatatctcaactatttaataaagttcaaagatattactatatatgcatcatgaattatgtcctatgcgctttgtcccgacctcttttatctgttaattatccagcaaatgtcatgaatgcaattactacaccgatgataggtaatgcctcaactaaacctacaccaatgaacatgatacccattaattgaccacgtgcttctggttgacgtgctacaccttcaactgttcttgaaacgattaaaccgttaccgatacctgctcctaatgctgataaaccaattgcgattgctgctgcgattaaattcataatttaatttcctcctgtgattgtatataattattgaaatttttagtgttcatctgccactttatgtgacatataaaccatcgaaagcataataaagatatatgcttggattgttcctacaaatattgaaaatgcttgccaaacaattaatcctgggatactaataatccaaccccatgctggttcgttaaagaataagccagcaagtaatgttaatagtatctcacctgcaaatatgttaccgtacaaacgcagaccaagcgttaatgttgaagtgaactcttcaaaaacattaataattgccaatggccaaaacggctgtacataacctttaagatattgtttcgtaccacgcattttaattccataaaagtgagttaacagtattatcgttgtagacaacgttaaagtcactgttgcatcagctgtcggtgatttccaccacaatgtgtgatctttcgttactatagaaaacggaagacctaacatattagctataaaaatgtacagaatcagcgttactgctaagaagtggaattgaccaccttttttccaagccatgttaccttcaatgattcccctcacgaaatcaaaaatccattcaacgaaattttgtttgccagttggtctttttttcaaattacgcgtacaaatgatagcaagtagaaaaacaagaaacgccgtaacaagtatcatcaatatacttgataaattgaaaacgatatcaaaaccgaataaattccaactcacgagcggggatttgtgatccataatctcacctctttcttaatttatttgctcacctttagtaaaggacgtatgataactacaacatatgaaatcattaaaccaataattataccgatgatacttacatgcgctttattaaggtaccaaatcatacaggcaataattgcaactaagtatcgccacatatttccagttgaaatatgcatagtgtctggtcttttagctttagctaaatagcattcaaaaatacatgtgttgattgcagaaccagtaacaccaatgattaatcctaagataaatgcatggtgtgtataaaggtataatcctcccaatattattattagataaaaataatattgaatgaactgtttaaaaatgttgtagaaacgactcattttatatgcctccgtgtgactgatatcaatcatgaaaaccgttccactcatacaaactaaatgataatataggcgatttgtggtgtcaattctattcaaattgttgtaaaaaaataagcatagttagacacaatttagacacaattagacaaaaagtctattttcctcagaaatcgcttggtttttcagtgattaaattcaaataatacttaatatgattaactattctttctgaagcaaatccatcaccgtaaggattagatgcttcagacatttgatgatataatctctcatcatcgattaattcttttgcagcttgatacacattttgcttatttgttccaatgacttttaatgtgccagcttcaacaccttcaggacgttctgtaacgcttcgcaaaactaaaactggcttattaaatgatggcgcttcttcctgaattccacctgaatctgtcaaaataaaataagattttttagcaaaattatggaaatctactacgtccaaaggttcaatcaattcaattctgtcatgactacctaaaatcttttgagccacctctcgaactttcgggtttttatgcattggatataccagtgctaaatcagtatactcatctattaagcgtctaaccgctttaaatatattttccatgggtttcccgatattttctcgtcggtgtgctgtcataagaatgaattttttgtcatggtatttatccatgatgttagatttataattgtcatcaactgtatatttcatagcatcaatcgcagtattaccagtgacaacaacactttctgaatatttcccttcacttaacaaatgcgatgcagcatttttagtaggtgcaaaatgtaagtcagctaatacaccaactaattgtctattcacctcttctggaaaaggtgaatatttatcataacttctaagccctgcttcaacgtgtccaatcggcacttggttataaaatgccgctaaaccacctgcaaatgtcgtcatcgtatcaccatgtacaagtaccatgtctggtttttctaattgaatcacttgttctaattgagtgattgatttagaagttatctcagaaagtgtctgtcctgatttcataatattcaaatcgtattttggtttgatttcaaaggtacttaatactgaatcaagcatttctctatgctgtgctgtaacaacaacaattggctcgagcattttttcttgttccaaagctttaactaaaggagccatctttatggcttcgggtcttgttccaaatatggtcataatctttttcatcaaactacttatctccgattcttctatttagtaccaaacaatctatctccagcgtcgcctaaccctggtgtgatatatgctttatcatttagcttttcatcaagtgcagcaatataaatatctacatccggatgtgcttcatgcatcttttctacgccttctggtgctgcaattaaacacatgaagcgaatatttttagcgccacgtttcttcaatgaagtaatagcttcaattgctgatgcgcctgttgctaacataggatcaacaacaatgatttgtctttcagtaatatcttgaggtaacttagcaaaatactctacagcctttaatgtttcgggatctcgatataaaccgatatgtccaactctggctgcaggtactaaacttaaaataccatcagtcatacctaaaccagctcttaaaattggaacgatagctaattttttaccagctaatcgtttagccgtcattttagttacaggcgtttcaatatcaacatcctgaagctctaagtctctagttacttcatatgccatcaacataccaacttcgtctacaagttctctaaattctttagtacctgtatttacatctctaatatagcttagtttgtgttgaattaatggatgatcgaaaacgtgtactttactcataaaaattactcctatctttgtgtatgtttattgatatagaggatattcagctgttaatttcgcaacgcgttctttagcttgttgtaatttttcttcatctttactatttttcaatgctaaactgatgatttttgcaacttcctcaaaagctttttcatcaaatccacgcgttgttgcagcaggtgtacctaaacgtataccactcgttacaaaaggtttttcttgatcgaacggaatggtatttttgttacatgtgataccaactgaatctaaagtctcttcagcttctttaccagtaagtcctatagacccttttacatcaacagctactaagtgattatctgtaccgccagaaacaattctaaatccttcattaattaatgcttctgcaagaacttttgcgtttttaaccacttgttgttgatacgttttgaaattattttctaacgcttctccaaaagcaactgcttttgctgcaataacatgctcaagaggtccaccttgaataccagggaaaattgttttatctatgtcttttttatattcttccttacataaaatcataccaccacgtggtccgcgtaatgttttgtgtgttgtagttgttacaaaatcagcatattctactggatttggatgtaaacctgccgctactaatcctgcaatatgtgccatgtctaccattaacttagcgtttacttcatctgcgatttctttaaactttttgaagtcaattgttcttgaatatgctgatgctcctgccacaataagcttaggcttatgctctaacgctaatttacgaacttcatcataattgattcgttctgtgtctttatctactccatattcaacgaaattgtagaatttaccactaaaattaacaggcgctccatgtgtcaagtgaccaccatgactcaaattcatacctaaaactgtgtcgcccatttctaatgcaactaagtaaacagccatgttcgcttgtgaacctgaatgtggttgaacattgacatgttcagctccaaacaatgctttagcacgatcaattgcgatgctttcagtaacatctacaaactcacatccaccataatatcggcgtcctggatagccttcagcatacttattagtcaacactgaaccttgtgcttccataaccgcttccgatacaaaattttccgatgcgattaactctatgttgctattttgtctctgaaattctctctcgattgcttctgcgataactttatcttgcttggtgatataagacataaaatctccccttctttcaaaaaaacttatttgtatttagcacgttcgccaccaatctttttcggcctagatgtggcaatagttacaattgcctgtcctacttgctttactgaggtccttacaggtacacatacatgtttaatatgcatgcctattaatgtttgaccaatatcaattccacaaggaacagtaatatgttcgaccacgatcggatccttcatatgctgaaaagcgtatgttgccaaactccctccagcatgtacatctggaacgacggaaacttcttccattgttaatggattatactgagatttttctattgttatcgctctgttgatatgttcacatccttgaaaagcaaaagtaacgcctgtctctttactcacaacatctaatgcattaaaaatagtttctgcaacttccatcgaaccgacagtccctattttttcgccaatgacttccgatgttgaacatccaattaaacatatatctcctttattaaaaaaggacatatcttttaattcgtctaataacattgtcaaatctttcataaaagcccacccttcctaaaaataaaaaaggaatatagcaaagtgctacactcctctattataacttatttaactgttaacatatactaattatacagaattcctactagcaaataatatcttttaattttaaaattaaacttacaagttcttcataggtatgtacatacatttcttttgttccaccgtatggatctataacttctcctgcttcttttacatattcatgcaatgtgaaaacatgattttgcaaaccaaagtgtgcctctattaattctttgtgcgaatacgacatcgtcaaaataatatctgctttcaaatctgcttcagtaaattgttgcgataaggtcgtttcagctaaatgatgttcttcaactaagtcttcaacataattcgaaacaccttgattgttcacagcgaatatacctcttgattcaaattgatgatttggcataacctcttttgcaatactttccgctaatgggctacgacatgtgttacctgtacaaacgaataaaatcttcatagttcacatcctttaataatgtgattacctgcagcttttaacatgcgattcataattgcttctgtattatcattcagctcaaagccgtatatatacgccgctgaaatattttcattttcatcaagtgaatgtaacacatcataaagattatgacttgcttgtttaacatcattgtcatcctgacataattgaatgaattgcgcttcacttggtataaacgccaccttattactcggcacaataaaagctatagaagaccaatctttaccgtcatttccaattttgctctcaatatctgtaataattgtaagtggtgtattgggtgagtaatgcttatacttcatacctggtgcaattggctgttcagtatcattataatcagcatgggcgatactattcggaagtatttctgtaatcattgctgctgttatagaaccaggtcttgcaattttataaggaaaagatgtgcaatctaaaaccgtactttctaatccttcttcactttgttcagcttgaacaataccatctatacgggcattcaaatcttgatatacatgattgaaagttgttggtgaaggtctaccacttaaattagcacttggagcagctagaggttcatttatgatttgtaataattgtctacctacagaatggcttggcattctaacagcaactgatgataaacctccagaaacttttcgacatagatagcctggctttagcggcaatataaacgaaatagggcccggccagaatgcctgcattaacttttctacgcgtggatccaaagtatatgtaaaatcttttaattgaactttactgtgtatatgaacaataagcggattgtcagatggacggcctttagcttcatatattttagctacagcttcttcatctgtcgcatttgctgcaagtccataaactgtttcagttggtaaacctattaaaccaccgtttaaaacaatgtcttttatttcattaattttaggatattgctgtaaatcttcattatattctctaacatcccaaattttagtatccaacttaatcacgcctttcttatttatcataatataaagcaaaaagctatgcacttaactaatcatagcaaaggcataacttctaattaccatttaaatgagacgattcgatcgtggccatttatatctttaataatgtcgatttttttgtcaggaaatttatttaaaattattgatttaagtgcctcaccttgattgtaaccaatttcaaaaacaactgggctgcctttttccataacgtgaggtaaatctccaatgattgattcataaatagcatatccatggttatctgcaaacaatgcctgatgtggttcgaatctcgtaaccgttggagacatcgtaaccatatctttttcatctatatatggtggattagatatcaagccgttcaacttgataccttctttaattaagggctttaatgcatcccctgttaaaaattgtatttgtgattgatgcttctcagcattattacgagccatattcattgcttcaagtgaaatatcagtagcaataacatttaaatccggcttttcacatttcaaagtaattgcaagtacaccactacccgttccgatatctacgattgttgcatcatcttctaactgttgtaagaaatgcaacattacttcttcagtttcaggtcttggtatcaaacaatttgagtttacatcaaacgttctaccataaaatgaggcaaagccaactatatactgtataggctctcctaataacatacgttgtaatgctaagtcgaacttcataatcatcgctttcggcatatcatcatgcatgtgaactacaaagtccgtacgcgtccattgaaatacatctaacattaaccattcagctcgtgtttgttcaaaccctttttgttgtgttaaatgaattgcttcatctaacttttctttataattcaccattattaagttctttcaatttatctgtctgctctgataaagtcagtgcatctataatttcttctaaatggccttccataatttgccctaatttttgaagcgttagacctatacgatggtctgttacacggctttgtggataattataagttcgaatacgttctgaacgatcaccagtaccgactgctgatttacgttgtgacgcatacttttgttgttcttcttgaactttcatatcgtataaacgtgcttttaacactttcattgctttttcacggttttgaatttgagacttctcagaagatgttgcaatgacaccagttggtaaatgggtaatacgtactgcagagtcagttgtgtttacgtgctgaccacctgcaccacttgaacgatacgtgtcgatttttaaatcttcatttctaatttcaatttctacatcttcaacttctggtaaaactgccactgtagctgttgaagtatgaatacgtccacctgattctgtttcaggcacacgttgaacgcggtgcgcaccattttcaaatttcaatttactatacgcgccattaccagaaactgagaaactaatttctttgtaaccaccatggtcactttcagacgcttctactatttcagttttgaatccttgtgattcagcatactttgaatacatacgcattaaatcaccagcaaaaatcgcagcctcatcaccacctgctgctgctcttatttctacaataacgtctttgtcatcattaggatctttaggaatcaataatattttaagctcttcttcaagatttggaagttcagctttaataccattactctcctcttttaacatttctacttcttctttatcatcagtctcacttaacatttcttcaatatcagctaattcttcttttttagctttatagttacgataaacatctacagttttttgtaaatcagcttgctctttagaatatttacgtaatttatctgaatcatttacaacatctgggtcacttaacagttcatttaactgttcgtatctttcttctacaatatctaattgatcaaacacttataattcctccttattattatcactaggtgctacgatatggtgcgcgcgacaacgtggctcataactttcattggcacctactaagataatcggatcatcgattttagctggtttaccatttattaatcgttgcgttctactagatgaagaaccacaaacagcacaaactgcttgaagtttcgttacttgttcactgacagccatcaatttaggcattggttcgaacggttcgcccctaaaatccatatctaatccagcaacaataacacggtgtccatctgctgatagtttttctactatacttacaatttcatcgtcaaaaaattgcacttcgtctattcctataacatcaacattagttaagttgtgcgtcataatttcacttgctttagaaatattaatcgcttcaatggcattaccattatgagagaccactttttctttatgatatcgatcatcaatcgccggtttaaatacaacgactttttgtttagcgtatataccccttcttagacgtcttattagttcttcggatttaccgctaaacatactacctgtaatacattctatccaaccggaatggtaagtttcatacattgagagttccacctttttcaaaacataatcgctttattatatcatatttcaaatattcataaatgtctttttcataattatatcgatattgtacatgaacaattattttataaatttgtcttgcatatttatatacagctattctaatttgttgcttcttattcgtgcggtgtttctactcaatacaaactttaataaagggggaaatttatcattatgtattaacaacatggtattgagtcacttctttgaacacagtcgtaagtatatacccttactacgcttataaataaaaaagctgtctacaattccattataggatgcagacagcttaacgattactatattagttgtttgatttaagaccaaactttttgttgaaacgttccacacgtccatccgcagcagcgaatttttgacgtccagtgtagaatggatgtgaatcagatgaaatatctaaacgaataactgggtattcttttccatcttcccactccatcatttctgaagatgtttttgtagaaccgcttaagaatttgaagtttgtagtagtatctaaaaagattacttggtgatactcaggatgaattccttgtttcattattttcagctcctttgccctgaaccatctggaacagagttatttgtgagtttttacccaatactgtgtaattataaaggtaattaattcaaaacgcaagcccctatataatgtttattaaattataggtcgacccgttttagtactttcttctgcagacttttgtagctgcttgaagaaatcttcattattcttagaccttttaagtttgcgaataaatctttcagtaaagtcagttgagtcagtgaatagatttcttaattgccataatgtgtctaattcagatttacttattaacaattcttctttacgcgttgaacttctgccaatatcaattgcagggaagatacgacgttcagacaatttacgatctaaatgtaactccatgttacctgttcctttaaattcttcgtaaatcatatcgtccatacgtgaacccgtatcaactaatgcagttgcaagtattgttaaacttccacccgcttcaatatttctcgctgcaccgaagaatgcttttggtttgtgtaaagatgcaggatctaaaccacctgataatgtacgaccacttggtggaataactaagttataagcgcgtgctaatctcgttatagaatccattaaaataatgacatcttccccaatttctactaaacgctttgcacgttcaagtaataattcagctactttaacatggtgttctggtggttcgtcaaacgttgaatgaacgacttcagcagcttctactgagcgttctaaatctgtcacctcttcaggacgctcgccaactaacaaaataaatagctttgcatctggtttgttcgtactgattgcattcgctatttcttttaataacgatgttttacctgctttaggtggcgccactattaaaccacgttgacctaaaccaatcggtgttactaaatccatgatgcgcgttgaataattttgtgtttctgtctctaatttaatacgctcatctggataaagtggtgtcaaagcttggaaatgcggacgtttcttcacttcttctgcgttatggtcattgacaaagtcaacttgtaataagccataatatttttcgttatctttaggttttctaactttcccagttactttatccccacgtttaatttcaaaacgacgaatttggctagcagatatataaatatctttttcccctttagaatagttcactgttcttaaaaaaccataaccatctggttgtatatcatctaagataccttccatataatagttaccatctttttccatttgtgcttccataatagctagaacaagttcttttttatttaatttactatagttcgtcaacttaagagttttagctttttgagtgagttccttggtagtatagttcttgtacaattcgtggaatgattcatactgaggagatgtacgttctctttcaggcatatagtttacacccatttcattattttttagttagtaagtaatagataggcatgacaatgcataaataactgtgctagcacaatcccattatgctaatccccaaccttttaaatacatgaataactatagcaaatttttattttaattacaaaatctatttataaaaattgcaaaattaaaacagtacacaaaacttaattagtcatgtgcactgttttattgcgatttttaattcaaaaatcaaatttatttaaaatatccagctatagatttcacttctaagaactcttcaataccataatcgccccattcacgacctaaaccagattgtttatagccaccaaatggtaaatctggctttctacctgcttcgtttatttctactgtacctgcttcaatagaacgagctactttatgcaatgtttctttgtccttaccaataacatatcctgccaaaccatattttgtatcatttgcaatttgaatcgcttcatctaaatcgttataagtgataactgacattactggcccaaaaatttcttcttgtgctatcgtcatttgattatctacattaataaaaattgtcggacgtgcaaagtatcctttttcaagtccttctggtttaccaggaccaccataaaataattcagcaccttcttcaatacctttattaatataattttgtacttgatcaaattgttttttactaatgatagggcctacttgtgtaccatcttctcttggattaccgacacgcacttggctaaattgttcttttaattcagctaagaatgcatctttaattttgttaggcactaaaacacgtgtaccagctgtacatacttgaccagtattattaacaactttgcctgttgttgctttagccgcttctttaatatctacgtcatctaggacgatatatggtgatttgccaccaagctctaatgatacctttttaaaatctttagcggctttttccataattttagaaccagtagggcctgatcctgtgaatgacatcatgcgtactttaggatgttcagataaaggattcccaacaccagcaccatcaccattaacaaggttaaatacacctttaggaacaccgactttatcaaaaatctcagctaaaataacagctgcaaatggtgtttcttcagatggtttaagtacaactggactaccagccgcaaatgctgctgctaattttaatgatgtttggtttgtagggaagttccacggtgtaattaatccagatacaccgattgcttctttaacaactaaatcatctccgcggcgttcttcaaattcgtagttatctaatgcgtctctcgctgcaacaaaatggtttagtcccatttgataatggacacgctcagataatgataaaggagcacctaattcatccgtaatagcttgtacaatatcgtcttttctgttttcatattcttttacaattttatctaataacgcttgtctttctttcacagatgtatgacggaactctaaataaacatcgtctgccgcctcgacggctttatcaacatcagctttattacctttagcaactttcccgattacttcttcggttgctggatttataacttctatcgtttcattactattactttctacccattcgccattaatgtattgctttgtgtagtctctcattattctttcactcctcaagaatgatttatatattatttatccgtaatgcatacgatataaacattacattccattatgatacgctccattttaatatgttcaaaataaaatgctttaaaattttgctgcatctatttttttatatttttaaataaaaataactattcccacatcatcgcaaataatgcgaagacttagaaatagttataatcaatgctatgtttaaacgtcatgtaattatttagcagtacgttgatctgttaaatcgacatatgattgcgcccatgcttcaattggatgtaaagcctctgctaacgctttacctttttcagttagcacataaataatttgtactggactcgtagaaatgatttgcttctcaactaactcccattgtgcaagctctgacaacttaagacttaaagcacgtggtgttattgttttcaaatctcttttcatatcggaaaagtgtgctgaacagtcattacatcttgagagataattaatgattaatccattccaacttctaccaagtattttaaaagtttcttcgagatacggacatacttccatcatcttcacctctcatcaataaatttagaatgtaaacgaacacccttttttaatcagtataattattataccacaaaacaagataaatctatacagtttccgtccaaatatctgcacctaaagcttttaagtgttctacaatatctgtataacctctataaatatgttttacattgtaaattgtagttacaccctcagcaattaaaccagcaataattaaacaagctcctgctcttaaatcgctagcataaacttcagcaccatgtaatgttgatggttttatcgttgctgtgccttcgtcaacttcaatatttgcacccatgcgctttaattcttcaacatgtttaaaacgctccggataaatcgtatcagttacaaatgaaggaccatttgccataaataataatggtgtaataggctgttgcaaatcagtagcaaaacctggatatactagtgttttaatatcaacaaattgatatggcgcattattattgatgcgaattctttcgtctcttacatcaacattcacacctaattcactaaatttagcagttaatgtttctacatgtttcggaacaatattatttaatataacattttctccacatgctgcagcgatacacatatatgtgcctgcttcaattctatcaggtataacttgatactcagaaccatgtaattctttgacaccattgattttaattgttgatgtgcccgctcccttaatattagctcccatacttgttaagaagttagcaacatcaactacttccggttctttagcagcattttcaattacagtttgtcctgttgcataaactgcagctagcataatgttaattgttgcacctacgctaaccatatctagaaaaatatgcgcaccttttaattctttagcttcaattttcattgatgtcgtgcttgattcatcaatttcagcacctaaagctttaaatcctttaatatgttgatcaattggacgtggcccaagtggacatcctcccggtaaaccaatcacacattttttaaatctacctaacatggcacccatcatatagtatgaagcacgtaatgattcaactttattatttggtaatgcagcattttgtatttcagttgtatcaacttctaattccgtaccatttagtgatgccttaatatttaaatcttctaataaactcactaaagttttaacatcagagatttgcggtaacccttctaatttcacatgtccttgagctaataatgttgcaggaatgatagctacagcactgtttttcgcgccactgatattaacttccccatttagtgtgcgtccacctcttatttttattacctcttgagccatatcatttatctcctttgtccattactttttaattttttgcattattagcattataaattaattttactttatttgtaaaatagtttattttaatcgttaaaatcttgtctttctattttcgattgattaataacaaatcattcacctttactaatatatgctgttcttccccacttgaccatggtctaaagtctgattattcaactaaatattgacgttgttttgataattatttagttttaattctacgatttgtacgtaaacttttttcataaattgctcattttccttataattatatcacaatcaattttggtatattttaccatttttacgctttcattttaaaatcaaactgttttatttattacttatacgacataaaaaagaagcaaacaccattttgtctgcttcttttaaaattaatatccctacgttattaataacttaaaaactaaatattaattatttagcgcggtttgaagtaccgaactctttaattttacctttaactgtttctttgatggcttcacgtgcaggtcctaagtatttacgaggatcgtaaacttctttgtcgttatttaaaacgtcacgaactgcttttgctgaagcgatttggttttcagtgtttacgttaattttagctgtaccaaatggaattgctttttggatatctttagtcgggataccagtaccaccgtgtaatactaatggtaaacctgtagataaaccgatttcttccatttctttaaatcctaattttggttcacctttgtatggaccatgaactgaacctaatgctggcgctaatgcatcaataccagttttttcaactagttcttgacattctttaggatcagcataaatgatgccgtctgctacaacatcatcttcttgtccaccaacagtacctaattcagcttctacagaaacacctttttcatgagcgtattcaacaacttttttagttgttgctacgttttcttcgaatgggctgtgtgaagcatcgatcattactgatgtgaaaccagcatcgatagcttctttacatttttcaaagcttgaaccatggtctaaatggattgctacaggaatagtgatgtttaagtcatgcattaacccttcaaccattttaacaattgtgtagaaaccgctcatgtaacgagcagcaccttcagaaacacctaaaattacaggtgcattttcttcttgtgacgcttctaaaattgcttgagtgaattctaggttattaatattgtattgacctaccgcataaccattttcttttgcatcaattaacatttctttcattgaaactaaaggcatgaaagttcctccttgagtgcttacgcacgtatttttcaaagtaattatatcaaaaaaatagcgtcaatgcattgaaatactgcagattaaatgtgtattttttgaaaaatgcgatagttatactaaatgcaaacgtatacatttttatacaatttaagccgttgcataatatgtagtcattaattacaatattttataagtagattggaggataaagatgtcaaaaatcttaaacacacaactaataggtatctttaataggctagaaaaacaatctttagaaattcaaatggccgcccaatgtttaattcaagcaattggtggcgaaggttatgtttatgtaaaaggttatgatgatttacagtttttcgaaagtttcattctacatagtgatgagcgtttaaaatctagccgaaaacttgacgctattaaagactttaaagaaattgactcaactgatcgtgtattattattcgcaccattttataatgatcaagttgcattagatattcaaaaacttatcgacttagatatcgatgtggtcttaataagcaacaaacctaaaacagatgatttccctgatcatctcgtacattttatcgatttatctacaccaagacctatagtctatactgaagattatgataagattgtccagccacatgcgatagcattgaattatgtatactatgacatttatacacaaatgattgaaatgacaagagacttagaattataaaagtcactattgttatttcataccttgtcactaacataatattaaaattatacgaaaaaccggtactttcaatgtttaacaatgaaagtaccggttttattagcaaatttatttattttgttgatattttaatgaagcttcaataaatgatttaaaaatcgggtgcggacgatttggtctagataagaattctgggtggaattgacaagcaataaagaaatcatttgtcggaatctctaccatttctactaaacgtccatctggacttgtaccagaaattaccataccatttgcttctaattgttctctatagtcattattaaattcataacgatgacgatgtctttcttcaatttccgctttaccataaacatcttgtgccaatgtgccttctttaatagaacatggatataagcctaagcgtaatgtaccacctaaatcttcgatatctttttgttctggtaataaatctataattgggtatggtgttgctgggtctaattcagctgaatgtgcgccttcaagtcctaatacgtttcttgaaaattcaactgttgcaagttgcattcctaaacaaataccaaagaatggtacattgttttctctagcatacttaattgcactaattttaccttcacttgcacggaaaccaaatccacctggtactaaaataccgtcgacatctgcaaggtattcggctgcattttcatctgttacttcacttgaatcaatccatctaatgtcaatatctttggcaaaaggatatccagcatgtttcaatgattcaacaactgataaatatgcatcttgtaagctaacatatttacctactaaaccaattgtaattttaccatctaaattattaacgatatctaacaactgtttccattcatcaagctgtgtttcatatttcgcgtttaattgtaaacgtttaataacgatatcatccatattttgttggcttaattgtaatggaatttcgtataaagagtctgcatcacgacattcaataacactttctttattaatgtcacagaataatgcaattttatcttttaaatcttgtgtcatttcatattcagttcttacaacgattaagtctggttgaatacctaagcctcgtaattctttaacactatgttgtgttggcttcgttttcatttctccagcagctttaatataaggcagtaatgtacagtgaacatacataacattttctctacctaaatcgctacgaatttgacgaatcgcttcaataaacggtaatgactcaatatcacctgttgtaccgccaatttcagtgataacaacgtctgcattcgtactttcccctgcaagtaataaacgttctttaatttcatttgtaatatgcggaataacttgaactgttccgcctaagtaatcaccacgacgttcttttttcaatacgtgtgaatacactttaccggctgtcacatttgaaaacttgtttaaattaatatcaataaatctttcgtaatgtcctaagtctaggtcagtttctgcaccatcatccgttacgaatacttcaccatgttgataaggactcattgtacctgggtcaacatttaagtatggatcgaatttttgaattgttacatttagacctctatcttttaataatctacctagagaagatgctgtaatacccttccctaatgatgaaactacgccacctgttacaaaaataaattttgtcatgtcttgacctcctaattattaaagggaatgcttcctcatcaattgtaaaaattacgtaaaacataacattaaagcaagctcattcaagttgtttatttgtcgaattcgacaaaattaaattctgtttacttaccgtttccatactgctatgtcactatgtatatcatttacaactttgatttttgcgttatcatttcttgatttactcaattaaataaaaaaacgctccctctcacaaattctgtaaggggagcgtataaattttatacacgtgtcctatttaaaggagcccgaataaaattttatcatctttcaactaaaagtcaaacaaaaaattaatcgttgaagtcttcttcgtcttcaaacacttcttcgtcttcgtctagttcatcttcatcttcttcaatgactatatccgaatgattgatttcttcttcaacctgctcatcttctggatcatttagttcttcttgatcatctgtttgagctggaatatcatcgtcgtcatccatttcatcttcgcccaataattttaagttttgatcttcttcatcatctgcatccagaatatcgaatttttgaatagttggtgcgattttctcttcaatatcatctaccgaataccaatcacgtaatccccataaattttctccaacatttaaaaaacgaccatctgtgtttaaatctgtgtaaaattgtacaacgcgattttcaatttcttcgtactcataatcacctaacgctctaaactcatcgatgatatcatataagttcatagtttcgcctttatcattcaataatgtataagccatatcaataaatgatttttcatcaaccatttgttttgtataatcttgaattttcattgcccaatacttcctttcgaaggatataatctaaatttatacgtctgaattcatttatatatagtaacaaaactaaattataaatgacaatatcatatttcgcaatcactgttagtaatttaaatatttttcaaaaacgacataatcatcagtttgttcgatttcaacgaaattactatttaaacataatggtttaaaatcattattctctccaaacagaatcatcgtaatcacattaaggttgtcatagttttttcttaagtaagttggcaattgtcgcagcgcacttgaaccaataccattaaagcgatatgatttatccacttcaatagcagcaatgttcatgcgttcaccaatctgctccaatgcgataaagccaaccttttggccatcaatcattaaattaatgatatgtacattggtcacttctgaacgactttcttcttcaagctttaatgacgaaacatgttttgaatctaagtccaagtaatatagtcgttctttgccaattggtccttcttctttagtcgctgtatgcatgaatccagcacgttcgtataggttccaagcattgtcattttccgcatctactactagatatagatgattaaaatcaggaaatacaccttgaacatattgcggcaatgacatcattattttcgtgccatatccaaaaccttgatatttttcattaatcgataatgaacgaatataaacgacattttcaggtgtatcataaccttcatgctgatagtaacgatgtaatacaaaaaagcccaccacttcatttttatcgtttattgctacgttagcaatcctatcaacatcattaattgcatcatcaataacttctttaggtaaagatgaatatatttgttgtctttcattcaagtcaaaatcattaattgctgaacgatattgttcatcaaatgcttttaaagtgataccttcaaaacaaagttctttagccatatatttaacccctatctttttatatatgaagcatgaatccccatattattttacctattatttcactacgataccattatttactctaagttaaataaattacttatttatatttttttaaatttcaaaattaatgtgctattcctcattactcatcattttaatcagagacttacaaatacactgcgtacgaactacttttaatattgcgtcactaactaacaatcctatacaacttcaaaattcctagaaaataatatatataacttaacgtctacgtttgtaatacattaattgcgatgcgcttacaatatcgaaatacaatggcatcaaatttgttaataattactattattacttgttttttagtcattttactatactattatttaaggatagacattaataatgaggtgggaatcttatgaaagttggcattgacgctggcggtacactaattaaaatcgttcaagagcaagataaccaacgtacttttaaaactgaattaactaaaaatattgatcaagttgtggaatggttaaaccaacagcaaattgaaaaattatgcttaactggaggtaatgcaggtgtcattgctgaaaacatcaacattcctgcacaaatttttgtagagtttgatgctgcatctcaaggactaggtattttgttaaaagagcaaggccatgacttagcagattatatttttgcaaatgttggtaccggtacgtcactacattatttcgacggccaatcacaacgtcgtgtaggcggtatcggtacaggtggaggcatgattcaaggactcggttatttactaagtcaaatcactgattataaacagttaactgacatggcacaacacggtgatcgtaacactatcgatttaaaggttagacatatttataaagataccgaaccacccattcccggtgatttaacagcagctaattttggtcatgtactacatcatttagatgctgattttacacctagcaataaattagcagccgttattggtgtcgttggcgaagttgttacgacaatggccattactgttgcacgtgaatttaaaactgaaaatatcgtttatatcggttcttcattccataataacgctttattacgcaaagttgtggaagattatactgtgttacgcggttgcaaaccgtactatgttgaaaacggcgcattttcaggtgctattggtgcattatatttaggtaaatagaaaaagaccatttatatgcgcgttgttttaaataaacgctatataaatggccttttattttatggtctacgtgttttggaatacgtattgtttcatttattatcacttaattacttacaactcaattcaattaaaatgtaagttcattagacaatttttgcgctgaaacaattgtaccaaccacgccagtttttaaatctattgcaacggctttatgatcatctctaagttcatctagccattctccgaaaacagaaccttcaatcgtaattaaatcacactcttcaaaatcttcatctcgaacttttaacgctctgtttttaatactccatacaggcataatatgcggctttttttcgtcgctatcattttcactaatgagaataaactgcttactaccttttttagttaagccgtatacttcatcatattttgctacatcttggacaaattctttgattctaattttatctaattccgtcatcacttcttgtgtaacagctacaacgtttagtagatgcccttcttcttccattgtttgattcataataatatggtcttgttcatcaaacaattcatctaattcataagtagcaaaacgatcaacgtccatttttacaactttatcaaatggaatatcacgacttgttaaaaatgatacggccacactttcttctgtccaaacgcctacatacgcttcacttttataatttaggcgtactagttttttatttttagaggcgaaataaatacattcatttattaatatatctctaaagaatggatatgctttataagacatgcttgaccctcactttttaaaatatgtcatacataaaatagtaaatgactccaacaagttagtcaattagacatattatgaattcaatttaatgtcatgtttttcattttaaaaattcaatagcattaaattttacgtatacacaaattcggtctataacacgaaacatatctagttactaaaaatttcaaaacgataacctttagtatacctttatcaacaaaatggcaactcttataacatagtgaaataaaagtcgccatttaatattagtattacaaagtattgccatatcataaatttaattactgttgactagaatcgaaaaaagcttgttacaaacgcatattcagtcaactactggcaacacaacattgtagcgccttatgttccgaactctaatagtgttcaagttcagctaaaaatgcgcgttcattctccagtactgtttcttttgaatcaccatgccaaatacagccaaaccttgatttaactttatcttcaccgtaccaatcaccatcataataagataacgggtataaactaccttctttgacatatttcaaaatcgtattgaagaaatgtgtgttatcaccttttgaatgataactataaaacttttgatatcctgaattcaactcgttagcaagtaataacatgctcgttgaaccattttgtctaaagtttaaatcaatcgcataaacgttatcatcctcatcgacgagtaggtcaaaaccagctacaccaaagaatccttgattcacaccgttttccataatttgtctacctgcttctataacgtgctctggtacattagtagtattttcatttccgttataaaatccgtacttatccgttaattgcgttgccgcaccaagatattgaatgcctagcgattccgagtatgcaaactgaacgcaataattcgctttttcttcaatcttctgttcgataataagcgaattcgtttcagcagttgcctctttaatacgcgttatcgctttttgtaaatctgcatcatgataacaaatcataacgccatagccacctgctgtcggaagatcatctcccggcttaattactaacgggaattcccaattcttaatctcgttttcgaattgctcaatttttacaacttttctttttggtaaaaacttcccatttgtccattcaggtattcttgctttattatttaaagcaacaaataacgttttatctaatgcataatattgctgattcaagattgtttcatcatgaatatattgaaaataaatctttttattttccttatgtgccaattgtttgatcaagttttcgtaagattgctgattgttaaatgtaaaaattgagttcggtacttccttaccaataacttgaaatagctgatgcaatttgtctgtcgcactagcttcgtgaacaataacaggtaattgatttgctattaataactccctaccagttaaaaaattagattgatgttcgtccggtttcaaccatggattcgatatatacgaaggtcttgacgtatagacaacatctttgtcatataaatcacttaacgttaagttcggctcattaccattatttgtcattacttcccattccctttcaaatgcgcatgctcttcaataatgtcttgataaacgtcttgatttgtaattaactctaaccccatcaacgccattattttagcacctttaattaatgcttcatcaccatgtacactcgcagccgcctctctaaatctatgcgtatgtcctactaaattacgtgatcctattttaatatgaggatgtattgttggcacaacatgacttacgttccctgtatccgtagagccataaccaaaatcatcatcaataactgcttcaccaacttcttcagcatatttagcaaataaatcatctaatttcggcgttttaatgaattcattcacaccgttttgaattggaccaaattcataatcacaaccagtctgtatcgcagctccacgtgcgatttgatttactttttctgttaatatatccaattctttacgcgtcattgctctagtataaaaacgagcatgtgtatagtctggaataatattagctgctttcccgccatctaaaatcacaccatgcacacgttgatcttttttaatatgttgtcgtagttgtgctacaccattaaaataactaatcatagcgtctaatgcatttaacgcttcatctgcattttcagaggcatgagcactttttccgtaaaatttaacatctaaaacatccactgccaaagtatcaatcgttttataagtttcatttcccggatgaatcattaaggcaatgtctatttgatcaatcacaccagccttgacataagaagctttagcgctaccattttccccaccttcttcagctggacatccaagaacgactactttaccaccaatttggtcaatcacttgcttcaaaccaattgcaccaagcacacttgcagttccaatgatattatgaccacaagcatgacccaaccctggcaaagcatcgtattctgctaaaaaacctatagctggcccatcaagacctgaatcatatgtcgctataaacccagttgcatgcccagcaatctcggtttcaatttcaaaatcatgctctttcaaacgatctattaaagttcgagacgcaaatatttcttcattaccaagttcaggacgttcatgaattctatgactgatttcgatataactatatttatttgtttctatataatcgagaatttgttgtttttcactcattttttactatctcccttttaccctacactcattttaatcatccacaatattttgttctttcaaaatgaattattacttattctatcggttttatctcatgatgtcatctagtttttctttatttacaaaattttctaataactaaaagcctttcataaatttataaaacagtttcaaattgtaaaacataagccctattgttacaatttaagtattgttagaaacacaacttacaacaaacttaagttttatattgcaacaaatcataagcgttttatagttttgagtagtaaataggaggaaattcaaaatgacaaaaatgaatgttgaaagtttcaatttagatcatactaaagtggttgccccatttattagattagcgggaacgatggaaggattaaacggagatgtcattcacaaatacgacattcgtttcaaacaaccaaacaaagaacatatggatatgccaggactacattcattagaacatttaatggctgaaaatattagaaatcatagtgacaaagttgttgatttaagtcctatgggttgccaaactggtttctatgtatcatttattaatcatgataattatgatgatgtattaaatattgttgaagcaactttaaatgatgtgctaaatgctactgaagtgcctgcttgtaatgaagtacaatgtggctgggcagcaagtcattcattagaaggtgctaaaactatcgctcaagcatttctagacaaacgaaacgaatggcatgatgttttcggtacaggaaaataaatcttagtcaatcaagttaatcagaaaagcagtcgaacaatgatgttacaatcgccattgtccaactgctttttattatgcttcaaagtcaaaaaatcgaacaaatgaaaaagtaaaatctttaacatttgtccgatttatttgagaaccactataatttcttaattagtcccattaacacgaactgcataggtaaccttaaatatagttgccatgttggcaattgtttatctcctaaaggtaactttttaactgccatatagatattagctgggaatacagctagcaagaatagattgattgtatttttcaagcattgagatggtcttttaattaaaagtgcaagtccaaataatatctcaaagattcctgtaacaagaaccgctgtttttcgaagtggcaaacatttcggtatgatatttctaaattgtcgttctcgtgtaaaatgcaatacacctattacactaaaacctattcctaataaatatcttagtatgttcaatcagcttcaactcctactctgtaatgattttatgaattaatgtaggcgatacaacatgatcagcaattgttatgcttgaatctaattttttaacaacatcgtctacatcttggcgattactgtgaatcgttaataatgattctccttcttctactttatcaccaatttttttatttaaaacaataccaaccgctaaatcaatatcatcctcttttgttaaacgtcccgctcctaacatcatcgaagcgacacctatatcgttagagactaattcagtcacataacctgattttttagctttatattcaatttgatattgagcttgtggcaaacgctctggatggtcaataacagtttcgtcgccaccttggtttttaataaatgttttgaatttttctaatgctgcacctgaattaattgcctcaattagcaacgctctcgcttcttcaagcgtttcagctttgtttgcaagtacaaccatttgagaacctaatgttaatacaagttctgttaaatctttcggaccttgtcctttcaacgtatcaattgcttcttgtaactcaagcgcattgccaatcgcacgtccaagtggctgattcatatcagaaataatcgccatcgtattacgtcccacattattaccaatacgtaccattgcgtgcgctaatgcttcagcatcttctaatgttttcataaatgcaccgctaccagtttttacatctaatacaattgcatctgcaccagcagcaatctttttactcataattgaagaggcaattaatggtattgaattgacagtaccagtaacatcccttaaggcatataattttttgtctgcaggagttaaatttcctgattgtcctacaactgccactttattttcattaaccaatttcacaaatgttgcttcatctatttcaacatgaaaaccatcaattgcttctaatttatcaatcgtaccacctgtatgacctaatccacgcccactcatttttgcaacaggaacatctacagctgctactaatggtgctaaaaccaatgtagttgtatctcctacaccacctgttgagtgcttatctactttgacacctttaatatcactcaaatctatcatatcaccagaattaaccatagccatcgttaatgctgcacgctcatcatcattcatatcttggaaataaatcgccattgctaaacttgatgcttggtaatcaggaatatcccctttaacatagccgtcaataaagaaattaatttcttccgttgttagtgtatgaccgtcacgctttttctcaataatgtctatcattctcatttttatcatccttttcttaaaaagcttaggacaaagcatctgcgctttctctagtccatttttaaaagcacaagcgaaaattattatagcaagctatcgatttcatttttaatatcacaatttcaatgcgatgttattattcttaaatagattggttataacgttaaagtccctattaaattatcttagaatcatcatggcatttatgatgtcttaaagctgatatcgacatacttatatatggttacgatgtcccatgcttacatatttttataaaattagtaatctgaatctgcttctaaaccttgcataatttgaacgcctgcgctcgcaccaatacgtgtcgcacctgcttcaaccattttattgaaatcttctaaattacgtacgccacctgatgcttttacttctacatcagcacctactgtatctttcattaatttaacgtcttctgcagtcgcaccgccacctgcaaaacctgttgaagttttaacgaagtccgcaccagccacttttgttaattcactcgcttttacgatttcgtcatggtccaacaataccgtctcaataatcacttttactgtgtgacctttcgcagctttcaccactgcttcaatgtcttgttgtacatcatcaaaacgtccatcttttaatgcgccgatgttgatgaccatgtcaatttcatctgcaccattttgaatcgcatcttctgtttcaaatgctttcgtcgcagttgtcgatgcacctaatgggaatcctattaccgtacaaactaacacctctgaatcagctagtcgctctgctgcatatttaacatgcgttggattcacacatacagatttaaaatggtatgctttcgcttcatcgatgatttgatcgatttgcgtacgtgttgactcaggcttcaataaagtgtgatcaatcaattttgcactattcatttctatctcctcctttatggttgattataaaaatacggttgtaaattagttgattgagcgtcaggttcatttaaatatcaggttagatgttcgctttttatgtaaccgcatacatatactattacattaattcatttcccataaacaaacaatacaattgaacgtgatatcttcattatgaacgatgacttgacaacaagctaatcaggattatatttttataattctttaattctatagtacaaaaattcgcaaaaaagggaaacaaatgttatcttaaaattattaatgaatattaaggagaagataacaaatgacaaaaggtacaccacatattcaaccaaatggagtaaaaattgctaaaacagtattaatgcctggcgatccgctacgcgcaaaatatattgctgataattttttagaaaatgttgaacaatttaacgatgtacgtaacatgtttggttacactggtacatataaaggtaaagaagtttctgtaatgggttctggtatgggtattccaagtattggtatttactcatatgagttatacaacttctttgatgtagatacaatcattcgtatcggttcttgtggcgcattacaagaaaatgttaacttatacgatgttattattgcacaagctgcatcaactaattcaaattatgtagatcaatacaatattccaggtcatttcgcgcctatcgctgacttcgagttagtaactaaagctaaaaatgtcgctgaccaaatcggtgctactacacacgtaggtaacgtattatcttctgatacattttacaatgccgatccaacattcaatgatgcttggaaaaaaatgggtattttaggtatcgaaatggaatcagctggtttatatttaaatgcgattcatgctggtaaaaaagcacttggtattttcacagtaagtgatcatattttacgtgacgaagctactacacctgaagaacgtcaaaattcatttacacaaatgatggaaatcgctttagaaatcgcagagtaacttatttaaattgactttaattgctctttaacaatgcgattaaactcaaaaagccaacacattctgggcgtatccccatttatgtgttggcttttatttatattattacttatctgtagattagcttaagtaagatttaaacatccaattatgtttatctactgatgtttgcatacctataaacatatcttctgatacatcatcgccagcattaccagcaatttcgattgcgttttctaattgttttgagatatttgtgaagtcttgtgataattcttcaaccatttgttctgcagagtaacctttcgcagcttctttaacaattgattgctctaagcattcagttaatgtacctacagggtttcctcctaccgctaaaattctttcagctaattcgtctacatattggcttgcttcattatataattcttcaaatttaacgtgtaatgagaagaagttaggtcctttcacataccagtggaaattatgtagctttgtgtaagctactgtccagtttgctacttgttgattcaattcttttacaacatcttgttgattactcatatttaatacactccttaaaattgtctacgtcttgcttgtttatattaattattatattataatgattctaatctgtaaagtgtttttactctcttttttataattattctaatctaaatgtaaggtgttccgctttttaaatgtctaaattttaattcatcatctagtatatccattatcaattagcaagtatgttttatcaatcagtaagttttactttcgcattatcatctaaaaagaacgatttttcataatcatttggttggtgccatgttgttttccacattctatttctattattagcaaacattcgataaccgaaattacggactggtttaggtacaagccataaacctacgcccaataatttagttcgattaggtagtgctgtgattagtttaataatcgcctgcgattcaaaatatatacgatcacctttctgtaaaatcacactatttttatttgccgcttctggatgttgtttaaaaaattgttgtccaacttcaccttttaacgtggcaaattgataatttcttggtaggtcatgttgaattaaccaaatgacatagttataacaatatatacagtttccatcataatatacgattggcataatttattcgctcctttaatagtacttatagtcatttttcctaatttaaaaacatttaaacaaggttgtcacttgataagtcctcgcgacacgaaattgccataaaatttatttttcagttttatatttattgtataatgtattttttatttactttaaatttctcaatctacagtgtaatcttatttcttattattaacttagcgtttggtcattcgtcttattcaacatacgactggaaaactcatataaagttttaattcagtaacataaattcatttatattcatatactgtctttattatttattaaaataaaaacgagcaatctatcataagctcttaattagctcttatggttgattacccgtcatttttctttatgcggttattcaaatatgcaattatgcaatttttaatcctatccttacttcttttcaaaaactaccatatatcattagtcatgtttgactttgactatacgtgtgtattttaaaaactgctctgaatatttctccttaatttcctctaaactgtcatatgtaatacctacaatatgccaattaggattgaaataatagaaagaatctttttgtcgtgaccatttaatcatattaccgtctttattataacgtggtaatgttacttcatagccttctaacacattaatatacgtttggaaaatgtctgtatctatacgattaaaattatcaataactaaataacttttatcctttttaggcattaattgagtaataaacccttcacgatagtataatgcccctgtttcatttggtaaatacttgccataaagcatatcttctgaaaaatcaggatgacctgttgttataacaggatttgcattcgctttttgcaataagtcattagccgcttttaagccctcttcttttcgatctacaacaagtaaaataaatggctttaacgcttcttctttttcactttcaagcatatctggttttttaaccatttcaaatggagatttcaatccattattatcgctcatttcaataattgcatcatactgtgcttgtgacatacttgcaatagcctgttttgcattttcttgaaggaaatataaatttttcaatttaggatgcttatttaatgtacttaatgtaatcggcgtaatgtctttctcataagacacttcaatcactgtactatttgttctaccaggaattggtggtttttcatgaatatgctttgaaacttctccaattccaacgacagattgatttttcgttcgattataaaaaataatattgtcgccttcttctaactgagtataaaaatgataaccattacgtttaataccgttgtacgtgtgcgtataaatcgtatattggtttccaggttcaaattcttcagtttcagctaaaaagaaataacgtggtatcttaatttcgcctttaccaagaccacttattaaatcaaactcttctgcagtgatttggttgaacaatgtctctttcatattactcatacgaaattccaaagcttcactacgctttaaataatcagctgttaatggtttcaattgttcattaaaacgaaactgtacacgtattttattttgtgcacctgtttcaacactaataatttcaccacatccaagtagtccagtatccgtctgaacttgataaaagatgacttgatctcctactttagcctttttaaacgctctaaatccttgagatgggttaaaatgtgcgcctgattcaaataaagctgtttgtcctactaacggttcattatgattccaacggttatatccacaattcaaccaaaaataattcgtttctgctgtcatcttaatactccttaacctgaataaattttagaaacactatgaattacattcttttagtgtttcttatgcagttggacgcgtatgcgaacaactgtataccctttgttcactgcgattttaatcgcatttcctataacattgtagcgcccaggacattaatttacgtcccagacccttatcgttttcacttctaagtaagtcgaactattttgctttacaacaagtgcgactctaaatacagttggacacacatacgagcaactgtataccttttaatcagttttctatattttatttattatatctgtcttaatgataaaaattgttacaaacagtttaacatatttagctacctattttgcatataaaaaacatgcttgcatacactatgcaataaaaattacaaatttatatatgataccactatgcttgcttatctctatagcgccattgatacacatttttaaatatctatactgccgttagaattttatcatgtcttaattttcattaaatattaattacttcattttatataaaccaacaaaaaccccctcactactatgcaagtgagaggttatgttgatgtgctttattttcatcaatgtcattaacacgatcatatttcttctgttaatgcactgtactttattcaaacgcgctatcgacaattaatttgaagctacaaaggtaccgcataatggcagcacattaattaacaatgcgctaaactttaatgaggcgctgatttgcttgtctttaaaagtcaacatagcactgataattcctaaaatagctactatacgtggaattgtcatgctcggatactgcggtatatgtaagaaagcaccaagacctgctatcacaccacatactaacgcaatatatagaaattgcttcaaatcattcactcctaaattgttattacactattacacatagctaatcatcaatgtgaaatcgccttcaaagacactatccaaatcttcagaagtcaaaataaagtttgtaccagtagtcagtttgaaaatttcaccatcgacaatcatttgtccttcaccttccaacactgtaactaaacagaactctctaggcttcatataatttaacgtgccagaaatttcccatttaaccaatgtaaagaaatcattcgatacaatgtgtgtacacttatggttttcaataatttcactttcaggcaaaatattaggtaatggtgcattgtactgaataacgtctaaagctttttcaatatttaacggtctatcattatattgattatcttgacgattgaaatcataaagtctatatgtaatgtctgacgattgcatcgtttcgtatgctaatattcctgaagaaatagtatgtactgttcctgctggaataaaatagaattctccaggttttactttaatatatctaagtatcgactctatcgttccgtgttgaacatgattcgcaacttcttctctagactctgctaatgtccctataactatttctgcatcttcttctgcatctataatataccaacattcagatttgccatattgcccgttttcatgctcataagcataagaattatcagggtgcacatgaatagaaagtgattctcttgcatccactattttagttagaagcggaaaatctttgcttgggaaatcaccaaacaattcacgatgttctgaccaaatacggtctaatgtttgaccttgatatggtccattaataatctcgctcgtaccatttggatgtgctgacacacaccaacattccccagttgtatcattgtctaattgatatccaaactcacttagacgttgaccgccccataattttgtttttaaaattggttgtaaaaataatggcattgttgcacctccattgtgattaagtaagcaatagaactctgatgttgttgttccattatattttgattttgttctcatttacatcgtattataaacttccacatttcaaattaactattagtgattgtaccatatttactaacattgcagtactgccaattaaagcgcttcacttaaatttacagtactttaacatttttaaaaattaatagcatagagattatctctctcttacatttgtacacatttccctttaaatttactcgcccattataccaattaataaacaactttaatagttgtgccatacattgttcaaattctttgtaaaatgcatagacaatacgtacttattcatacttataattcatcattttcaaaaaaataacgagttacgaaaacgtaacccgcttcaaatcatatttactatccttattaatccttttcaatttcaaattgagttaaagcatctttaatgtcctgctcaccactaataatttgaaactcttggtgattaaaatgattggatgtgacaatttcttttaatactgtcgcaacatcttctctaggaatttcacctttaccatcaaaatattgtgcagcttctatctttccagatcctgctgcatttgtaagtgcccctggatgtaaaattgtataattcaaacctgaacgtcttaaatagtcatcagcgtaatgtttagctattgtatatggctttaaatcaccgctatcatcaaaagcctgacgtctcgaatcatatgttgaaaccatgacatagtgtttaatattagcctctttactcgcaatcattgatttaacagcaccatctaaatcgacaataattgttttatctgcacccgtgttccctccagaacctactgaaaagataactttatcgaatggtttaaacgtctcagttaaagtctctattgaatcattttcaacatcaacaagaattgctttcataccttgtgattttaacgcattaagttgatctgattgcctaacaccagcagtaaatggtacattttcttttgctaattgttgcactagtaacgaacctacaccgccattagcacctataaccaaaatattcatttacaacactctcctatttattattctctatgccataccactttatgagatatgtaaaacttgttacaactataaaaatcaattgacatactactgggaacgtattaaattaatatatgaacaaatattcatatgaaaggattgtcatataatgtcagaacaatattcagaaataaatacagatacattagaacgcgtaactgaaattttcaaggcattaggcgattacaatcgaatacgtatcatggaattgttatcagtcagtgaagcaagtgttggtcacatttcacatcaattgaatttatctcaatcaaatgtctcgcaccaattaaaattacttaaaagtgtgcatcttgtgaaagcaaaacgacaaggccaatcaatgatttattcattagatgacatccacgtagcaactatgttaaagcaagccatacatcacgcgaatcatcctaaagaaagtgggttataatatgtctcattcacatcatcatgaccatatgcatagtcatgtaactacaaataataagaaagtattgtttatatcgtttttaataatcggtctatatatgtttatcgaaatcatcggcggtctccttgctaacagcttggcattactatctgacggtatccatatgtttagcgacacattctcattaggtgttgcacttgtcgcatttatttatgctgaaaagaatgccacaactacaaaaacatttggttataaacgtttcgaagtactcgcagcgttatttaacggtgtaacgctttttgtaataagtattttgattgtttttgaagcgattaaacgtttctttgttccttctgaagttcaatcaaaagaaatgttaatcattagtattatcggtttaattgtcaatatcgttgttgcattctttatgtttaaaggcggcgacacttcacacaatttaaatatgcgtggtgcttttctacatgttatcggagacttattaggttcagttggcgccattactgcagctattttaatttgggcatttggatggacaatcgccgatcctatcgcaagtattttagtttccgttattattttaaaaagtgcttggggtatcacaaaatcttcaattaacattttaatggaaggcacaccaagtgatgttgatatagatgaagttataactactattaaaaaggattcacgaatacaaagtgtgcatgattgccatgtttggacaatttcaaatgatatgaatgcattgagttgtcatgttgttgtagaccatacattgacaatgaaagaatgtgaattattattagaaaacattgagcatgatttattacatttaaatattcaccatatgactattcaattagaaacgcctaatcacaaacatgatgaatcgattatatgttcaggaacacatagtcattcacataaccatcatgctcatcatcacgcgcatgtacattaataattttaacctactgccattgcatcgattaaacttttcaatggcagtaggttttttatgtctttatggcgacttgtttggtctttgatgatgcaatgtttattaacaaattttcaactattatttcttacattagtcatatttttgacaatttactattataattctctaactttagtcactttaattaatttttattagatattaatatgaaaataacgtgttttttgttattgtatttatatgaagaaaaggaggcaccactttgtttacttactttaaatcagcatttaaaaatgctaaaccacaattattaataacattgatatatgcacttatagcatttgctgtaattgcagttgtatatttacttgctaatttccagcttgctaagtatgcacaaactattgcaatttattcacaatttgggcaaaaaccaccagtagatgcatatttaaaagttatcgctgtattacttatagcagctgtagtttcactgtttgttttagttcaaatttttatcggaattacaaatgttatgaaacgagcaatgagtcatgaaaaagtaaaatttaccgatttatttattgcatttaaaaaaggtaattatttaaagagcgttctgatcggtcttgtatctatagcaatgattatcgttctttcacttctgacatcattactatacaaattattttctccagtatcagaaatgattatgaattcagtacaatcatcatatgcagatagtacacacctgattggtattgctattacaactcaaagcatcataatcattgttgttttattgattaaagcaattattacttggttattgttaatacctattttcaactttatgactagtttcgttgaatcaactaacgataaagtaaaaacacacttagctaatggatttaaagcaatgaaaaatggtcaaaaaacatttttcaaatttttcattggaatactattattaaacttaattattattttatttaaaacacctgttggttacttgatttcatttaatacgcaatcactctctcaaagtgttgcagaaaatatcataagagtttatacagtaatgacaatcattttattcgttgttattcatgcaatcattttaatgggtatcgttcaatattacttaaaacgtggtcaaaaaattactaaagataaagtaaaaacagctgacaaggataaaaaagttgtcactgaaccaaaaaatacaaaagtagaaaatggtaaagtgacaacatctgttgaaacaaaaacagaaaaagcacaagattcattaaatgataatacaacaaaaacgatgacttcagataaaccagaagacaatcaaccaaaataaattttggagccccttacaactttagttgttaggggctcttatgcatgcgcttagcgcaggcgctcctacttttcaactttagttgttaggggcttctttctaaaataactaagtgaattatctatatatgaagaggtctccaatactttttatataattcgtgattacattctatacttttaattgtattttctgctgtatggaaagttggttttattaattctgattatgttcagaactacaattcataagaaaaatgtgttaaaatatatttgtagtaagtagaagcaaaagatgaaaatctttaactcttgaaacacaaaaagggcaacactcggaaacatgttaccctaatgagcccgttaaaaagacggtgaccttatattttatttaaaaatagccttcaaaatgccggtcaaagcgaatagaaggttattttttatggtcttgagtactaatcaatactaaaccaatgattgttaatacaaccatcagcatttcaaaatcagacatgctagtcctttctaggagtaacaactataaccataggcatcacccctttattaagagattagccaccatctatccaacttgctcaataaatattataacatgcacacttttaaacagtaattcatagtataagttttttcatttcttaatcaactcgataaacagttgagtgacatacccttgtctaactagctatttcttcccctgttatcgtttgttcatcatataaaaatttaatttctcattttttattctctgataaagaagagcaccaaccttttcggctgatatgctcccttcaaaatagacattgaaaaatgaaaactttgaaagagaaatcgtcagtctattattgataagtattatcctatcctcgaaaaattactttcagacactagtgaacaaaaattttactataagcgtatactttggcaatattcgaaggaaaaacatggattaacctgtgcatattatacatttagagcttatatacttaaacatgatgaatttactccttatattatgaaatgttatcaatagatgtcgcctaaagatacaacaagattcgagacaaaacctgatcatcaagcacagtttgactggaaagaaagcattaactttaaaacgaaagataatcaaaggattccactatatataggtgtgctactactttattattctcgttttataatcatgcataacaatgagtaaatcaagtgatgccttatttaattcattaacacaatcgtttgagctaatagaaggtgtatataatgaacttgtaacggataacttgaaaatagtcatgtataagccaagaaaagaaagtacaagtggtcgaataaatcgtagatttaaataattcgctgatggttttaaatttcaagtaaaaccttgtatttccggcctccctagaaaaagataaagttgaatcaataacaaaaatattagatgaaattaatgcttaccaagacgaattgcatttggaagagattcctaagtttttttaatcttaatgaacgatttaactactaagttcatactagtacaggtaaattgcctattactgcctaagagaaagaaaaaattttcttacaaccactacagaatgtgaatgtaaaaaactcatataaagtgaaacatatcttacttatggaatgaaatgtttgattatcccaaaatcacaaatgcgattttggagttgttaggggctctaacgcaaatacacccctacttaaaataacggtagttgttatagtatacttaaatgcataaaccatataaaaggtgatgctaatatgacatacggttcaattgtagctatactctgtgccctatttgtgattttcttcattccatatatggagaagaaagacaaaaagaagaagtaacactagtatctggattactagcatacaaaggagcagtaagacattttctaatagaaaataactttactgctctttgtacattactcatcaactattgtaaattaaataataaataactacctattttattaatcagctaaaaaatgctttgctaaatattttgctgcgccatcctcttcattcgtgtatgccgttacatctaaagttaatgcttggatttcagggcgtgcatttttcatagcaactgtataatgaccaaattcaaacattgctctatcattgtcgctatctccaataactaacgtttcttcttgatgaataccaaaatgtgcaatcatttctttaatgcctgtacctttatcagtttgataagccattgtttccgcattaaatcttgatgaatttgaaacactaatctgtagttgcacatgattttgctttaattcatctctaaatgctgttattttttctaaattagaactgaatagataaatttttgaatattcaccttcaggaaacttagttacccaatctatcttaccagcaagcgcatcttgtcttgaagaccattcactatgacttacgccattaataggatcttgactacgaatcatatctcgcatccatgtttcatcttcttttaaagaaactctattaccttcaaaaggaaatacctcataataaatttgttggcgcttagctaaattagtaatttgttgcacttgagccaatgataaaccatgcttgaagataatttctccatctacttctccaattgttccatttgaactaatgatgccattaaccgcaaaatcttgaggtacaagttgatgtatttcagaatgcgaacgtcctgttgccaaaaatactttatatcctttctctctcaattgattaatgacatctttcgtatacgttgatgcttgattattttcatgtaaaattgttccatccatgtccaaaaatattgcttttacgttatccatattgccctccactgtccattttatcttaattaaattttgtcattattacttattatttgcaaaatatttactctaacattgccatagaaaatcgattattccatctttgaactgctacatttttctggaaaaatcgtgacatgttttcagatgtcaaaatatcatctattaatccttgttgtacactttccccatcttttaatagcaaaattttagtaaagttaccagtaatttcttcaataaagtgcgtcacataaatcatcgcaagcgttggatatgaatctgacaatgagtcaagtatattcaatagtgactcacgagcaataaagtctaaaccagctgctggctcatctaaaattaaaacctgaggttgccccattaaagctcgtgcaatcatcactcgttgtttttcacctgtagataaataaccaatatattgttgcgctttagcagatattccaactaatttaagtaaatgatgtgcttcattacgtacctcatcatcaatatcttgataaacaccaattgatttaaaagcaccgcttatcaccacatcgattactctttcaccctcttgaaacttttccagtaaactatgagatacaaaacctatatgttgtcgtacagtctctgcagaataccctaccttgcctggcattttaccaaatagattaacaccgccagttgtcgcaggctcatatgcatttaatatatttaatagcgttgtcttaccagcaccattcaacccatataatatccatttatcacctttagcaatttgccaagaaatattttttaaaattgtttttccttgcttcattcgcccaatttgatctaattgaattaacatgcgaggtcacccctttattgctactccatacttctcataaaatcatattaacataacacccttaattgtcagactatttaaataaataaaacacttcctttttacgcatttctgccaaattaagatgaagtaaaagctaagtcgacctaaaaaagcacccttctagtcgattaatctaaaagggtgccatatactttaattttaatacatgattgattctaaaaaagtgaattattctacagtaactgatttagcaaggttacgtggtttatccacatctaaatctctgtgtaatgctgcataatatgaaatcaattgtaatgcaactactgaaactaatggtgtcaataattcatgtacatgaggaatgacataagtgtcgccttctttttcaagaccctccatagaaataatacatggatgtgcaccacgtgctactacttctttaacgttaccacgaattgataaattaacgttttcttgagttgctaaagcaacaactggtgtgccatcttcgattaatgcaatcgtaccatgtttaagttcgccaccagcaaaaccttctgcttgaatgtaagaaatttctttaagttttaacgcaccttctaaacttacgttatagtcaatagtacgtccgataaagaatgcattgcgtgttgtttctaagaaatctgttgcaatttgttccataattggtgcatcgtcaacaattgcttctattgctgttgttacttttgctaattctctcaataaatcaatatctgcttcacgaccgtgctcttttgcaacgatttgagacaagattgataatactgcaatttgtgcagtatatgcttttgtagatgcaactgcgatttcaggacccgcatgtaataacaatgtgtggtctgcttcacgtgataaagttgaacctgcaacattagtgattgttaatgatttatgacctaatttattagtttcaactaatactgcacggctatctgctgtttcacctgattgagaaatataaacgaacaatggtttttcagataataatggcatgttgtagacaaactctgatgcaacgtgtacttcagttggtacgccagcccatttttctaaaaattctttacctactaaacctgcatggtagcttgtacctgctgcaataacgtaaatgcggtctgcttctttaacatcattgatgatgtcttgatcaattttcaagttaccttctgcatcttgatattcttgaataatacgacgcattactgctggttgttcatgaatttcttttaacatgtagtgtgcataaacacctttttcagcatctgatgcatcaatttcagcaatatatgaatcacgttctacaacgtttccatctgcatctttaataataacttcatcttttttaacaataacgatttcatggtcatggatttctttatattcgcttgtcacttgtaacattgcaagtgcgtctgatgcgataacattgaaaccttcaccaacacctaataataatggtgatttatttttagcaacatagattgtgtctttgtcttcagcatctaataaacctaatgcatatgaaccatgtaataatgacacaacttttgtaaatgcttcttcagttgaaagtccttgatttgaaaagtattcaactaattgaacgataacttctgtatctgtttctgaaatgaatgatacaccttgtaagtattcaccttttaactcttcatagttttcaataacaccgttatgaactagagtaaaacggccatttgatgattgatgtggatgagagttttcatgattcggtacaccgtgtgttgcccaacgtgtgtgaccgattccaacaggtccatcaaaatcgctactatcagcaactttacgtaattctgcaatacgacctttttctttaaatacagttgtattatcatcatttactaccgcgatacctgcagagtcataacctctgtattctaatttttctaaaccttttaataataattctttggcattatcatagccaatataaccaacaattccacacataacgacattttcctccatattggaatagtacgcgtaaattatgatttattgccgataatttagattgacaatctgctttcataatataaataggaacatgctattatcgcattcatccataacaaattaagcatagttatttttacaactatacaaattgctcacactgtactttccatattaatattttttatattcaatttctggcgatcttattaactttgtccattaagtcaccctaatgttttacttaataagctaacgaatgagccacatccgggatagcatccgccgatctattcgatcactatcctcctcgtctacaaatacatatattgcactctataaaggccactcatatattaacctttaatcttcaaatacaaatatttatttgcacaggcgctttaactgtactgccgaactttccccctttccattaatcattattgtacaacggtgttgttttgttttgcaaatattttcacaataaaattttaaaaatcctaaaacaatttttttgttttactttttcaaaatatctatactgtcacattgatgacactttatttaattttgtcacatttattttgacaaagttgatttttgtttatattgagtaacaagtaacgtctctatacactatatatagtcacatatattaaaaaagaggtgtaaatatgtcgcaaactgaagagaaaaaaggaattggtcgtcgcgttcaagcattcggatcatttttgagtagtatgattatgccaaacattggtgcattcatcgcttggggtttcatcgcggccatttttatagataatggatggttacctaacaaagatttagctactttagcaggaccaatgattacttatttaatcccattattgatcgcatttagtggtggtcgtttaatttatgatttacgtggtggtatcatcgcagcaacagcaactatgggggtcatcgttgcattacctgatacaccaatgttacttggtgcaatgattatgggtccacttgttggttggttaatgaagaagaccgaccaattgattcaacctagaacgccacaaggttttgaaatgttatttaataacttttctgctggtattttaggatttatcatgacgattgcaggatttaaaattttagcaccacttatgaaatttattatgcatattttatcagtggcagttgaagcattagtacatgcacacctacttccacttgtaagtattttagtagagcctgcaaaaattgtatttttaaacaatgcgattaaccatggtgtattcacaccgcttggtgcagatcaagctgcaaaagctggtcaatcaattttatacacaattgaatctaaccctggaccaggtttaggtatcttacttgcttatatgatttttggaaaaggcactgcaaaagcaacgtcatatggtgctggaattatccacttcttaggtggtattcatgaaatttatttcccatatgtattaatgcgtcctttattatttatcgctgttattttaggtggaatgactggtgttgcaacttatcaagcaacaggatttggatttaaaagtcccgcgtcaccaggttcatttatagtttactgtttaaatgcacctagaggtgaattcttgcacatgttgctcggtgtcttccttgctgcacttgtatcattcgttgtagctgctttaattatgaagttcactagagaaccaaagcaggatttagaagctgcgacagctcaaatggaaaatactaaagggaaaaaatcaagcgttgcttctaagttagtatcttctgataaaaatgttaatacagaagaaaatgctagtggtaatgttagtgaaacatcttcatcagatgatgatcctgaagcgctattggataattacaacactgaagatgttgatgcacacaattacaataatataaatcatgttatttttgcctgcgatgcgggtatgggttctagtgcaatgggtgcaagcatgttacgtaataaatttaaaaaggcgggcattaatgatattacagttacaaatactgcgattaatcaattgccaaaagatgctcaattagttatcactcagaaaaaactaactgatcgtgctattaaacaaacaccaaatgccatccatatttcagtggataatttccttaattcaccaagatatgaagaacttttaaataatctaaaaaaagatgatcaagcataataattaaataaattaaaaaatggaggataccgccatgttattgagtacacgtgaaaaagaaatgatagccctattgattaagtaccacagtcaatatatcactatacacgacattgctcagcaacttgcggtgtcctctcgtactattcaccgtgaattaaaaggtgttgaagcatatttaacttcattttcattaactttagaacgcgcaaacaaaaaagggctacgcattgctggcgcagattctgatttaaacgatttgaagcaatcgattgcacaacatcaaaccattgacttatctgttgaagagcagaaagtaattattatatacgctttgatacaagccaaggagccagttaaacaatatagtttagcgcaagaaattggcgtttctgtccagactttagcaaagatgttagatgatttagagcttgatttaaataagtaccaactatctttatctcgaaagcgtggcgaaggcatttacttggtaggtactgaatcaaagaaacgtgaatttttaagtcaattaatggtgaataacttaaatagtactagcgtttattcagtaattgaaaatcattttgtctttcattcattaaatcaaatccacaaagactttgttgacttagagcgcatttttaatgttgaaagactattaatggactacctaagtgccttaccctaccaacttaccgaatcaagttatttaactttaactgtccatatcgtgctatccatttcacgtataaaaaatggagagtatgtcgcattaaacgatgatatttatgattctgtacaaaacacatttgaacacaaagtagcaagcgaacttgctgataaacttggtcaaatatatgacgtcacgtttaatcaggcagaaattgctttcattactatccatttacgtggagctaaacgaaaaaatcttaatgatacatcattaaataatcgttgtgaagaaaacaaaattaaagcgtttgttaacaaagtagaaatgatttccggtatgacatttgcagatttggatactttagtagatggactgacgctacaccttaatcctgcaatcaatcgtttgcaagctaatatcgagacctataatccgttaacagacatgattaagttcaaatatccaagactatttgaaaatgtaagattagctttaaatgattgttggcctgatttgatttttccagagagtgaaattgcttttatagttttacactttggtggctcgattaaaaaccaaggtaatcgatttttaaacatattagtcgtttgcagcagtggtatgggaactagtcgtctattatcaactcgtctagagcaagtttttagtgagattgagcgtattacacaagcatcagtcagcgatttgaagtcactagatttaagtcaatatgatggcattatttctactgtgaatttagacatcgactccccctatttaacggtaaacccattattaccagatagtgatatcagttatgtcgcacagtttttaaatacaaagtctacgttccaagagacgcatgataaatcatcaaacatgattgataaggatgatgttcatgttgaaacgaaagatgttgatggcaacacatcttttgaaaatgaacaaacttcatacttaacttcagttttcgaaaaacatttaagtgacgaaaaatcagaacaattattgcatcatatgcgttcgggtttaactttgcttgattcagtgaaaatagttagtaccgaagttaaacagtggcaaacatatatcgcagattatctatatcaatgcgatgtaataaacgatccaacgtcattcgctgaactactagagcaacgattgattgacaatccaggatggatattaagtccatatcctgttgcaataccacacctaagagacaatatgattaaacaccctatgattctaatcacagttttagaagaaccgttaacattgcctagtattcaaaatgacaatcaaacaattaaatatatgatttccatgtttattcctgacaatgattttatggcatcactggtaagtgacttgtccgaatttttaagtttgaaattagaatctattgatacttttatggaaaatccacaggaacttgaaacattattaagaaacaaatttttagaacgaattaaaaaacaatttatttaggagtgtacaaaatgagcgaattatttagtaatgacaatatctttttaaatgtaaatgttaacagccaaaatgaagcaattgaaaaagcaggtaaagccttagttgatagtggtgctgtaacagatgcttatattcaagcaatgaaagatcgtgagcaagttgtatcaacatttatgggaaatggcttagcaattcctcatggcacagatgaagctaaaacaaatgtgattcactcaggtttaacattattacaaatccctgaaggcgttgactgggatggcgaagtagttaaagttgtagtgggaatcgctggtaaagatggcgaacatttagacttgttatctaaaattgcaattacatttagcgaagaagaaaatgtggatcgtatcgttcaagcaaaatctgcagaagaaattaaacaagtattcgaggaggcagatgcataatgaaagcagttcactttggtgctggtaacataggtcgtggtttcattggttatattcttgcagacaacaatgttaaagtaacatttgcagacgtcaatgaagaaatcattaatgctttagctcatgatcatcaatacgatgttattttagctgatgagtctaaaacaacgacgcgcgtgaataatgttgatgcaattaattcaatgcaaccttctgaagcgttgaaacaagcaattctagaagctgatattattacaacagctgttggtgttaacatactacctattattgctaaatcttttgcgcctttcttaaaagaaaaaacaaaccatgttaatattgttgcttgtgagaatgctattatggcaactgatacattgaaaaaagcagtacttgatattactggccctcttggtaacaatattcattttgctaactcagcagttgatagaattgtaccattacaaaagaatgaaaatatattagacgttatggttgagccattttacgaatgggttgttgaaaaagatgcatggtatggtccagaactaaaccatattaaatatgttgatgatttaacaccatatattgagcgtaaattattaactgtgaatacaggacatgcatatttagcgtatgctggtaaatttgcaggtaaagctaccgtattagacgctgtaaaagatagttcaattgaagctggcttacgccgtgttttagctgaaacaagtcaatatattactaatgaatttgattttactgaagcggaacaagctggttatgttgaaaaaataatagaccgtttcaacaattcttatttatctgatgaagtgacacgtgtcggacgaggtacgttacgtaaaattggccctaaagatagaattataaaaccattaacatatctttataataaagatttagaacgcactggtttattaaatacagctgcattgttattgaagtatgatgatacagcagaccaagaaactgttgagaaaaataattacattaaagaacacggtttaaaagcgtttttaagcgaatatgctaaagttgacgatggcttagccgatgaaataattgaagcgtacaattcactttcataatttattgagctttgtttgaaacaagaagtttccaacgttattcgttaacaatcagtaataatgtagtagttccgttgaattaacaatattaaatttctgaacataaaaaatactcccttcaacatagacacttaacttgtgttatgtatgaaaggagtatttttgcgttaataatttgttttattttcgagccacagcgacctattcaattgctattggtcattactaaaacaaattcatattaactgttagacttggttacttagtaaggaatatttccctatgaaataactagatgttcacattcttgaataaattttattcttcagtttgttggtctttcttagtgaatcttctaattaagaatgccatacctgcacctagagctaattcagcatatggtaaatcgtcattatgtgacataccagtatctggtaaagttttagcttgttgtttaggcttattaacttttccttgttggtctgattttgcatttgctttgttttcttcaggcttagttacattaagcatatcttgatgcatactatgactaccatttgaaactgttgctggagatgcattggcaccgtcgttttgcgtagctttattgtttgcagctgaaccaactgatttttgcgtatcattagtttgcatatctttagctttattgtttgcaactgggccaactgatttttgcgtatcattagtatctgctgttgccgtatcatctttttggctaacattagttgaagtcattttatcttttgcttcagaagatgcagatgttgatggtttattcgaaacttcagtatcagctttgcttggcgatttatctgcttcgttagatgcaacgttagtttcagacttaagttgtcctgcatcagtttgatttgtcgtactttcttctttatcttttgatgtattagaaggtacatttggttctgttatgtctgctgaaggcaatgtttcagttgttgattcaaccatactttgatttgttgaatctctaccatctttttctgccttagctttattttcagattttggttgtgcaaccttgccattagttgattgagattcagcactattatttacttcagcattttgttttgaatcatttacagatgcattatctttactatcagcagatgatgctgcttctgtgctcgcagttgttggagccgttgctgttgatcctgttggtgcattctcgtttgttgctgtagttgtactattgttatttgttgtgctttctgctggcgttgcattatctgtttctgttacaggtttatcagttgtgccgttattagttgattctacttctggtttactagttacatcgttatccattgtcggactgtttgttgatgcatctgcactagaattgttattagcttgcggtttatcctttgcatcatcagttgctgatgttactgttgtttcacctgttgccgcatcactattatttggtgttgtcggagaagcgtctgctttgccattatctgtcgtctcagatacgttaggttgtccagtgttttctggtgttgcattagcatttgaatttgctgttgcatcattattatctgtaccattattagtatcattagcatctggatcattctgaggcacaatcgcttcaattgcaggtatcgttacattttgtaattcagcaacctctgtatttgtttgtgttttatctaatttatcagcaaatctgtcaaaatatctacctaaatctgtacgtgcaatttctttcgccgatgcatctgcatctgcatttttaattatttctatttgcttgttaaccacttctctaattgcttccaaagcatttttcttaactactggattaatacgttgtgctttaagttgttcaagcgcactatttttgacagtagcgatttctgcatttgtagtttgatcagaaatatcttcagttgcttttgataaaatgtcttctaaagcattcgtaaacgcttctttttcttcagttgtagcatcagcgtcgacatttacacctgcttcaatctggtctagtgcagtttctaattcttcgatagctttttgtttttctgttgagtcaatttgaatgttatcaaatgcctcaagtccttgagctttcgctttttcaacttcagcagttgttgttgcatcagtaataccttgtttagcttgatctgtaatttgtttaatcattgctaatgcttcagttttttcttcagcagttaactggtcactatgatcaattgattctttcgtatcttctgctttagcttcaatagcttggttcgctttaggtttaacagtagcatctacttgaatagtatcaattgctgctttaccttgtgttaatgcatcatcaacgtcaccattatccacaccattattaatgttttctaatgcagtttgaacattttggtcaacttgcttaattgcttgttgcttttcatcttgtgttgcattagtgtcagctgaaatattatttttcttctgatctgcataagcatataaatctgttgtagctgattcttttttacctgttggaattgtgtaatcgttaatattatctaagtcattatgaatttgaacttcaatgtcatctttagaagtagcttgattaacattttgatccgcagtttgttttaattcagcaagtttttgtttcgcttcagcaatttcacttgaagtcgatgcgttagagttatccgcttcgtttactttagcattatatgcatcttcaattttagctaaagcatcttttttgtactcactaaatgttttaactgcattaattttagcttttccttctttaactgcattatcaacatattcatttgttgatgattgatcgacatttgttttcgcttgatttaattcagtatcaacttcttgttttgcatcattaatttcttgttgtgatgcatttggtgtttgttctatttgtgttttcttatcagctgcagcttgatctaattcttttttacctgctggtttcttaacaggatttgcatgaagttgttgaactttttgtactgctgtatctttagcagtagttacatcacctgtagtagttgctgcattaatattatttaaaccttcttcatatgctgctctaactggtccaatatcgttacctttttcttcattagtagtctcattattattaagtatttcagttattttattttgcatttcagttagcaattctgctcttgcattcgttttaacatctgttgatgcttgaattgggtcaattgcttgaattgcattatcttttgcagtgtttacatcatcgattgactgtgcattttcaatattttgattaccttgtgttaattgtgcgtctacttgttgatttgcttgttctttttcttcagtagtcgcatctgcagtttgtgcaataagcgctttttgttcgtttgcttttgttgctaattcatctttcgcaacatctttaattgttgtatctgcagtaataccttgaatatcagcaactgcttgatctttaatttgcgtaacatcattagttgtttgtgcatttaagatatcttgatacgctttttctttagcttttaaaactaaatcttttgctgcatttttctcttcagttgtagcgccagttgtattatcaattgcttgattttgagttgtcacagcttgatcaacttcatttttcgcattcgatttaactgctgttgctggttgtgtgctttgaattgaattctttccagcgtctttcgctgtatctacaccattatcatcagttgcagctgtaatattatttttcgcgtctgtaactgctgttgctaattgttgaatagctgcttctttttcttcatttgtagcgttctgatcattattgataacatttgtttgcgttgcttgtaattgatcaatctcatctttagccgcttgtttcttaacaacttttggtgttaccgcattaattgctgcttctgcattagctttcgcttcatcaacttgtgcgttagtagttgctgctgaaatggcttgatttgctttaccattttcagtatttgcttctgcatcagctgcttgtttttcttcatctgttgcatctggtgtagcttgaatctcttgcaatttgttatttaaaattgctgtgatttcattacgtgcagttgcttttttattaactgttggtgttacttgatcaatactagtttcacctgtcgttttcgcttggtctacatcattttgactattagcagcttcaatgttgctatttgcttgtgtcacagcattatctacgtccgcattagccgctgcaatttcttcagcagtaatatcttgcgtttgagcgattgctgttttacgttcattcgctttcgtagcaattgcttgtttcgcattatctttagttgttgttgctggctgaatcgcttcaattttagcaatttctgcatttttagccgcttcaacttccacatttgaatgagctgcatctattgctgcatcagcagccgttttttcagtttgaacttgttgtttagcagcttctttttcttctgttgttgaaccgttattagcatcaattgctgtttcttgagcttgtactttatctgcaattgcttgttttgctgctggtttaacatttgcatctggcgtaattgcagctattgtagcttcattagtagtttttgcattatctacatctgtatttgctgtagcattatctatatcagcgtttgcagtaactactgcttgatcaactttatcttttgcagcttgttgttcttcagtagtcgaatcattcattgcttcaattgcagttttacgttcacttgctttttgagcgatttccgctttagcatccgatttcttagttgtggcagcttgcacttgattaattgcagcaataccattgtctttagctgttgttacatcactgtttgtatttgcagcatcaagatttgttcttgcttcttgctttttagcatctaattctgtatatgcagcttctttttcttctgtagttgaagcattgctattttggatttcttgtttacgtgtattatatgcgttttctacttctgtatcagctgcaggtttaacttttgcttgtgtttgaattgcattgattttatctaatacttttgctttagtatcagccacttcttgttgtgatttaacaacttggatgtcatgtaaaccttctgtttgagctgcatctactgctgcatttgcctctgctacttcttcatcagttgcatttgaaactgtagcattttgcgcttttctagctgtagctgcttgtctaacttctttataagcatccattttagtttgagttgaatccgtaatattctcaattttgaatatttcttcgtttttaacgcgttctaaatcttgtgcagtcgttgtcgcttcaattgctttaacaccagaaactttagctgcattaatacgttcaatagcttccgctacttcttcatttgttgtatcaggatttaaaggtgcttgatcaatttgtgcttgaacaacttcgtcaaattcttcaagagctgctgctttagctgttgtagcaggtgtagtttgattaatatcattgattgcttttgttttaatggcttctacttgtgcatttgttgttgctgcatcaatatctttaattgcctttgtttcaattttaccaattttatcatttgctacatctttttcatcttgtaatgatgcatttgactttttaatttgttgtttacgagttgtaactgcttggataatatcttgtttcgcttgaggtttaactgttggtgtaatcacatcttgttctaacactgcgataccattatctttttcagttgtgacaccttgtgatgttatttgtttattaatttctgcgattgcattatttttatcattgttaattttagtcacaagcgctgcaacttcatcttgcgtaacttttttactttgttgtgctgctgtaaccttttcttgagctttagtatctaattcagcaattgctgcttgattatcaattaatgcagcttgtaatttagttactaaaccgtcaatatccgcttgagatgcacgatttgcagtttcaacgtgattcgcatcttcatttaaaatagtgtctgcttgttgtttaagtttattgtattctgcaattgatgctgttgtgtaatgactattatcaacttgtgagtttacttgttgttgcaacgcatctttgttcatttcaaccgctactgaaaatggatctgcagttagtgtaacttctggttgcgcattattaattacaacatctgaagcagtacgatatgttaatttttcattaaaatcaatatttttaggtgtatcgatattcgcaacattaactttatatgataattttaaagatttatctgggaataaaacttctttagtgtgtgtaccacgtgccgttgtcacaccttggcttgtaaatgtaactttatttgcagtttgatcataattaacagtcatatttttcaatactgtactgtcttcattaccattagggaatgttgtagttaatgaatcattaacgtaagttacaccttgtggtaatgttacttcatatttaaattgatctgcttttaatgaagcaccaaaattaccattgttaccgatttcagtattaatagtatattctttattgttagttgctttcggtgctaaatctctatttttgacatataaatgtgatcctgagaatagacctacattatcaatgaatgaatagtatttataaccatctttatttgttgtaattcttgaagcatcagcaactgctgtattgtcaggaataaattgtaaatctaaacgatcagcatcagttggtactttaaataaatgtgcagtaccagtcttagcaacatttacagttgctaattcagtatttttcttagcatctttaataactaaatttgttgcaccttgcttactattcgtttgcatagtagtaaagttaataattaattctgaatctggttttacatttacagtttttgtaataccgttaaagttaccatgatctgtagaatcatttgcattcacacgacctaatgcagccacgtttcctttagcttgatagttttgagggttattcttatcaaacatatcgcttcgtcttaattctgagttaacgaaaccaatcttaccgttgttaattaatgaataaccatttactttatctgtaacagttacagttggatcctgtctattctcatctgttgatatggcaggatcatcaaatgttaatgtcgtattaatactgccttcaccagtattgctagcatttggatcttgagtttgtgcgtttgctgctacaggtgctgctggttgcgctgctgctggagcattcgctggctgtgtttgatttgccggtgttgcattattattaggtgttgcttggttatttccttgacctgcttggtttgccggtgctgcttgatttccaggttgtgcttgtgcagcgttattcggatcagcttgattaccttgtccagctggttgtgctgctcctcctgctggattagcctgtccaccttggtttgctggctgtgctgcaggattagcttgagcaccagcatttgcgttaggctgtgtattggcatcagctggttgtgctggttgattttgtgcaggctgattttgctctgctgcagacgctgttgtcgggttagtagatataaaagtaacagtggcaattaaagctgaaaaaataccgacattaaattttctgatactaaatttttgttgtctgaataaattcattaagtcatcctcctggttgattattctcgctgttaaatgatttcacttaatcaactgttaagataagtagtagcatctgcgttaaaaacacaaagcaactctatctaattaaaattaattttatcatcattatatattgagtaccagtgtattttatattacatattgattactttgtttttattttgtttatatcattttacgtttgtactataaattatttctagaaacacaaaaaaaccgatgcatacgcatcggcttatttgtaatacagtatttatttatctaatcccattttatcttgaaccacatcagctatttgttgtgcaaatctttcagcatcttcatcagttgctgcttcaaccatgacacgaactaatggttctgttccagaaggtcttactaaaattcgaccttctccattcatttctacttctactttagtcataacttctttaacgtcaacattttcttcaacacgatatttatctgttacgcgtacgttaattaatgattgtggatattttttcatttgtccagctaattcacttagtgatttaccagtcatttttattacagaagctaattgaataccagttaataaaccatcaccagttgtattgtaatccatcataacgatatgcccagattgttctccacctaagttataattaccgcgacgcatttcttctactacatatctgtcgccaactttagttttattagatttaattccttcttgttcaagcgctttgtaaaaacctaaattactcataacagtagaaacaatcatgtcattattcaattcttgatttttatgcatttcttgaccaataataaacataatttggtcaccgtcaacgatttgaccattctcatctactgctatgattctgtctccatcgccgtcaaatgctaacccaaaatcactttcagtttcaactactttttcagctaatttttcaggatgtgtagagccacatttctcattgatattatatccatcaggactacatccaattgtttcagtatctgcttctaaatcaccaaataagaatggcgctagtgatgatgttgaaccatttgcaccatctaaaacaattttcaaaccttcaaagttaacatctactgttgattttaaatagctcaaatatttttgtgccccttcaaagtaatctgaataatgtacaatatcattgccaactggtcttggtaattctggattttcttgatccaataatgcttcaatttcattttcttgttcatctgatagtttaaaaccatctgatccaaagaatttaataccattatctgcaactggattatgagaggctgaaatcattacacctaactctgcacccatatcgcgtgttaaatatgcaacacctggtgttgaaataatacctaatcgcatcacttctgcaccaattgaaatcaaaccagctattaatgctgattctaacatttcacctgaaactctagtatcgcgacctacaagtacacgtgggtgtttttcacctttattatgtgctagaacatagccaccgtatcttcctaatttaaatgccaattcaggtgttagttcttggtttgcgacacctcttactccgtctgtaccaaaatattttcccattgtttactctcctttaatttagctatttattttacatttatataagccttcgtttcacttggttgtgctttagtgacatgttctggtaaattgatttttacagtcttttcagttgattctgaaataccatctaaatctacttctgcatcaacttcgcttatattttgtaagtcatctcgactaccgaagatttcaatttctttatcttctaaatcaatcgaacttaactctttatcatctgctaaactacctttctgtttaacatttactttaacctttttgctaaaaggctctactttaacttgtaaattcacttcattaggttgaatcgatacatttaatttattcagttttttatcaaaagccgttacttctgcgacatcttttgtgtcaccattaatctttttattagttttaaaagtggcttttaaataagcgatatcattcaattgttcttctccacctgttactttaactgtttgtggtgaaacttcttgctttgtaattttataaagtggatcaatatcactctgacttacatcaggttgaactgtcatctttttagttactttgttttcaagcgtaatatttgctaatttaggttttacagaataatgaatgtcatcagctaaccctttaacttgatacttctcttgatattttccagctttagcatttgataaatcaatcactactcttaaatcttctggattttcaatttttattatctttgattgtggtcctgaaatagtcacattaactgtttcaggcgcttttgttaaatgcaaatctttagtgttataaagaatttcaacgggtacatcttgaatcgttttactagacttttgaccaagattaccagtgttaaagatatttccaaaaacattgttaacagataaaaagaaaaacaatgccaaaagaaaggcaataaatctcaagccccatttactttctagcatattatttcacacctttcttttgaaagcgtgtgccaaaccaatgttcagcaagcaactcttcaaaaatttcgtttgaaatgtctcgtcgtaattttccatcaaatgttaccgaaatatcaccagtttcttcagatacaataacggtaaatgcatcagatacttctgaaataccaaccgcagctctatgtcttgtacccaaacttttagatatcttaggactatcagacaatggcaaataacttgctgctgctgcaatcttagtgccttgaataatcattgcaccatcatgtaaaggtgtgttaggtataaagacattaattaaaagttcttgcgaaatatttgaatccattgcaatacctgtttcaatataatcttgaagacctgtttctttttcaaagacaattaatgcacctatacgtcttttagccatatattgcacagcctttgaaaccgattgaatcaatttctcttcatctttactatacgtattagaagtatagcgttttaaaaagctacctctaccaagttgttctaacgcacgtctaatttctggttggaatattactattaaagctaataccccccattgaataacgatatcgaataatttagatgttgcagtcaagttcaatatcatacttatctgctgaccaataacaattactaatatccctttaagtaattgtatcgctttagttcccttaaagaccgtgatgagaagataaagtacataccaaactatcagtaaatcaaggatactcgttacaatttttaacgtactgaggttttgaaaaaagttggaaaaatccataacatctcctccgggtaatatttttccataatacccattataccaatcatttacatcactgtcatacgaacatatatttaaatagaaaaaatttattttaaagattataactactcttaatcattttagtgaattaaaaaaagtagtgcaaaaagcaaaatatactttatacactacaaatcatttatttataataaagtttcaccaaaaaatgttccaactaatgaaaccgcttgttcagcagtatgattattactgtcaatcaatggatttacttcaactaaatccattgaggaaattaaatgtgattgatgcagtaattccaatgcaaaatggctttctctataactaagaccacccaaaactctagtaccagtgcctggcgtttcaagcggatctaaagcatcaacatctaaagataaatgaacgccatcaacattgcgtgacttcaaatattctattgtattttcaattacttcctttatccctaatttatcaatatctgacatagtaaatgttttaatattatgatctttgataaattgtctttcacctttatctaaatctctcataccaattagtacgatgttttctggcttgattacattactatttaattctaaaagttctttgggaccttcgcctgtcaaaatccttagaggcataccatgaatatttccacttggtgactcttcaggtatatttaaatcaccatgtgcatcataccaaataacacctaaattattataatgtttacttattgctgatactgaacctaccgcaatagaatgatcaccaccaagaactagaggaaatctgttattttcaattgatgctgaaacctctttatttaatttttgattaacatctataatttcatcataatttcttaatcctttttgttcactatgaaatttttcaatgttcacagcaggtaccttaatatcccccttgtcatatacatcaaggtctaattgctttaatcttgaaattaatccagcatatctaattgctgttggtcctaaatcaacacctaattttctttgtccaaatgttgatggtgcacctataatatcaattgcttttgtctttgtcataagcgtccccctttgctctatgtaattaaagaataatgtatgcgcttaccattatcaagcaatagctacacatataatctgtttatcttattacttcataaaaaaaagcacttcccaaaaatggaaagtgcaagtagtgagccatagaggattcgaacctctgaccctctgattaaaagtcagatgctctaccaactgagctaatggctctaatggctgggctagctggattcgaaccaacgagtgacggagtcaaagtccgttgccttaccgcttggctatagcccaatatatagatggtggaggggggcagattcgaactgccgaacccgaaggagcggatttacagtccgccgcgtttagccacttcgctacccctccagcttattcatataatttaataatcaaaatggtggagaatgacgggttcgaaccgccgaccctctgcttgtaaggcagatgctctcccagctgagctaattctccaaaataatgactcctacgggactcgaacccgtgttaccgccgtgaaagggcggtgtcttaaccgcttgaccaaggagccatggctccacaggtaggactcgaacctacgaccgatcggttaacagccgatagctctaccactgagctactgtggattaatattatgcctggcaacgttctactctagcggaacgtaagttcgactaccatcgacgctaaggagcttaacttctgtgttcggcatgggaacaggtgtgacctccttgctatagtcaccagacatatgaatgtaaattatacattcaaaactagatagtaagtaaaagtgattttgcttcgcaaaacatttattttgattaagtcttcgatcgattagtattcgtcagctccacatgtcaccatgcttccacctcgaacctattaacctcatcatctttgagggatcttataaccgaagttgggaaatctcatcttgaggggggcttcatgcttagatgctttcagcacttatcccgtccacacatagctacccagctatgccgttggcacgacaactggtacaccagaggtatgtccatcccggtcctctcgtactaaggacagctcctctcaaatttcctacgcccacgacggatagggaccgaactgtctcacgacgttctgaacccagctcgcgtaccgctttaatgggcgaacagcccaacccttgggaccgactacagccccaggatgcgatgagccgacatcgaggtgccaaacctccccgtcgatgtgaactcttgggggagataagcctgttatccccggggtagcttttatccgttgagcgatggcccttccatgcggaaccaccggatcactaagtccgtctttcgaccctgctcgacttgtaggtctcgcagtcaagctcccttatgcctttacactctatgaatgatttccaaccattctgagggaacctttgagcgcctccgttaccttttaggaggcgaccgccccagtcaaactgcccgcctgacactgtctcccaccacgataagtggtgcgggttagaaagccaacacagctagggtagtatcccaccagcgcctccacgtaagctagcgctcacgtttcaaaggctcctacctatcctgtacaagctgtgccgaatttcaatatcaggctacagtaaagctccacggggtctttccgtcctgtcgcgggtaacctgcatcttcacaggtactatgatttcaccgagtctctcgttgagacagtgcccaaatcgttacgcctttcgtgcgggtcggaacttacccgacaaggaatttcgctaccttaggaccgttatagttacggccgccgtttactggggcttcgattcgtagcttcgcagaagctaaccactcctcttaaccttccagcaccgggcaggcgtcagcccctatacatcaccttacggtttagcagagacctgtgtttttgataaacagtcgcttgggcctattcactgcggctcttctgggcgttaaccctaaagagcaccccttctcccgaagttacggggtcattttgccgagttccttaacgagagttcgctcgctcaccttagaattctcatcttgactacctgtgtcggtttgcggtacgggcacctattttctatctagaggcttttctcggcagtgtgaaatcaacgactcgaagacacaatgtcttctccccatcacagctcagccttaacgagtaccggatttgcctaatactcagccttactgcttagacgtgcaatccaatcgcacgcttcgcctatcctactgcgtccccccatcgattaaaacgattataggtggtacaggaatatcaacctgttatccatcgcctacgcctgtcggcctcagcttaggacccgactaacccagagcggacgagccttcctctggaaaccttagtcaatcggtggacgggattctcacccgtctttcgctactcacaccggcattctcacttctaagcgctccacatgtccttacgatcatgcttcaacgcccttagaacgctctcctaccattgtccaaaggacaatccacagcttcggtaatatgtttagccccggtacattttcggcgcagtgtcactcgactagtgagctattacgcactctttaaatgatggctgcttctaagccaacatcctagttgtctgggcaacgccacatccttttccacttaacatatattttgggaccttagctggtggtctgggctgtttccctttcgaacacggaccttatcacccatgttctgactcccaagttaaattaattggcattcggagtttgtctgaattcggtaacccgagaggggcccctcgtccaaacagtgctctacctccaataatcatcacttgaggctagccctaaagctatttcggagagaaccagctatctccaggttcgattggaatttctccgctaccctcagttcatccgctcacttttcaacgtaagtcggttcggtcctccattcagtgttacctgaacttcaacctgaccaagggtagatcacctggtttcgggtctacgaccaaatactaaacgccctattcagactcgctttcgctacggctccacatttactgcttaaccttgcatcaaatcgtaactcgccggttcattctacaaaaggcacgccatcacccattaacgggctctgactacttgtaagcacacggtttcaggttctatttcactccccttccggggtgcttttcacctttccctcacggtactggttcactatcggtcactagagagtatttagccttaggagatggtcctcccagattccgacggaatttcacgtgctccgtcgtactcaggatccactcaagagagacaacattttcgactacaggattattaccttctttgattcatctttccagatgattcgtctaatgtcgtcctttgtaactccgtatagagtgtcctacaaccccaacaagcaagcttgttggtttgggctcttcccgtttcgctcgccgctactaagggaatcgaattttctttctcttcctccgggtactaagatgtttcagttctccgggtgtgccttctgatatgctatgtattcacatatcgataacatgacataactcatgctgggtttccccattcggaaatctctggatcaaagcttacttacagctccccaaagcatatcgtcgttagtaacgtccttcatcggcttctagtgccaaggcatccaccgtgcgcccttaataacttaatctatgtttccaccatttttataagtcaaacgttaacatgaagttacgttcttttataaaaagatttaaacgcgttattaatcttgtgagtgttctttcgaacactagcgattatttcttatgaattcaagcttatttaaaactctttattcactcggttttgcttggtaaaatctatattttacttacttatctagttttcaatgtacaatttctttttagtcaagcgctcgcatactgctttattttcaaaaaatcaaatgctcatttacaaaagtaaactccgctttaatttttcttaatgcattgtctgacaatcgctttctttaaaaagaatagattgtcaagcgctcgcataagcaatatcactttaaccaaaaaatatttgaatgttaaataaacattcaaaactgaatacaatatgtcacgttattccgcatcttctgaagaagatgttccgaatatatccttagaaaggaggtgatccagccgcaccttccgatacggctaccttgttacgacttcaccccaatcatttgtcccaccttcgacggctagctcctaaaaggttactccaccggcttcgggtgttacaaactctcgtggtgtgacgggcggtgtgtacaagacccgggaacgtattcaccgtagcatgctgatctacgattactagcgattccagcttcatgtagtcgagttgcagactacaatccgaactgagaacaactttatgggatttgcttgacctcgcggtttcgctgccctttgtattgtccattgtagcacgtgtgtagcccaaatcataaggggcatgatgatttgacgtcatccccaccttcctccggtttgtcaccggcagtcaacttagagtgcccaacttaatgatggcaactaagcttaagggttgcgctcgttgcgggacttaacccaacatctcacgacacgagctgacgacaaccatgcaccacctgtcactttgtcccccgaaggggaaggctctatctctagagttgtcaaaggatgtcaagatttggtaaggttcttcgcgttgcttcgaattaaaccacatgctccaccgcttgtgcgggtccccgtcaattcctttgagtttcaaccttgcggtcgtactccccaggcggagtgcttaatgcgttagctgcagcactaaggggcggaaaccccctaacacttagcactcatcgtttacggcgtggactaccagggtatctaatcctgtttgatccccacgctttcgcacatcagcgtcagttacagaccagaaagtcgccttcgccactggtgttcctccatatctctgcgcatttcaccgctacacatggaattccactttcctcttctgcactcaagttttccagtttccaatgaccctccacggttgagccgtgggctttcacatcagacttaaaaaaccgcctacgcgcgctttacgcccaataattccggataacgcttgccacctacgtattaccgcggctgctggcacgtagttagccgtggctttctgattaggtaccgtcaagatgtgcacagttacttacacatatgttcttccctaataacagagttttacgatccgaagaccttcatcactcacgcggcgttgctccgtcaggctttcgcccattgcggaagattccctactgctgcctcccgtaggagtctggaccgtgtctcagttccagtgtggccgatcaccctctcaggtcggctatgcatcgttgccttggtaagccgttaccttaccaactagctaatgcagcgcggatccatctataagtgacagcaagaccgtctttcacttttgaaccatgcggttcaaaatattatccggtattagctccggtttcccgaagttatcccagtcttataggtaggttatccacgtgttactcacccgtccgccgctaacatcagagaagcaagcttctcgtccgttcgctcgacttgcatgtattaggcacgccgccagcgttcatcctgagccaggatcaaactctccataaaaattatgatgtttgattagctcataaatactaaataatgtttgtaacttatagttacgttttttggaattaacgttgacatattgtcattcagttttcaatgttcattaatattcaatctcttttattctacttcatttgtttcttgaagtcaataactttttgaacgattactttatttattctatattgtttttatagttatttcaatggtaagttttacacttttgaaattcttctttaaaaacaactgcgtcgtttttgacgactttatcatattatcaactttggaatttaaagtcaataacttttttaaaactttttgtgttcacaacccgcttctttttcaacgcgtttattgcttaacacaagaacttattttaccagcattccaaaacaaatcaacataaaaacgtacaaaataaaagtaattttgtacgtttagcatatattatacctatttatttgtagcagctataactttttgtgcaatcgagctataaattttacctagacgatcatctgattgatatattgacggtgcaaaatcttttggattccaagatggttgctctaaaggtaattccccaagtaattgagtattaagttcatcagctaacttagtaccgccacctttgccaaagacatattctttattacccgtctctttactttcaaaataactcatgttttcaattacgccaagaatagaatgatccgtatgttttgccatcgcacctgcgcgagctgcaacaaatgctgctgtaggatgaggtgtcgttacaataatttccttacttgaaggtaacatcgtatgaacatctaaagctacatctcctgttccaggtggaagatcgagtattaaatattcaatgtctccccatttaacttctgtaaagaaattcgtcaacattttacctaacattggccctctccatataactggcgcattttcttccacaaaaaaggccattgatataactttaacgccatgacgttcaactggaattacttccttccctttaattccaggcttttcatcaatacccatcatatctggtacactaaatccatatatatcggcatctactaatccgacttttttcccttcacgagctaaggcaacggctaaatttactgcaacagtagatttaccgacaccacctttaccggaggctattgcaataaattcgactggattattttgagataataggccttctatcgttttaggtttattttcttcttttggtttaaattgatttactttttcttccggcaatgtttcaaatcgtataccgaccgttttcgcaccgttttcttttaatgcattaacaacagccatctgtaaatctaattgcggtgcaccacctaattgtgccattgctaatttaacactcacatgttctttttcttccttaatagaaacttcaacaataccttctgtttcttttaaaggcacatctataataggatctttaatttctcctaccaattctttcacttgatctaccgttaacaaagcaaatcccccttaatcattttaagacatctacatcatagcaaataacaatttttgcttagtctatcactaaaagtataaaactttttattaaataaaaaaagcagttagcctattattttaaatagaccaactactataattattttaaaatttccttctattactttctatttctttaggttctcttataaaaagtgctatcacataagctgccataacaagcacagctacaaaagcaaatgagatatccacccctatagcaatggattgctgtttaatttcagttgcagttaaatgcgatggcgatgtagataaaaatatttttgcaccaaaactcattaatgtaaccattaaagctgtgcctagtgaaccagccattacacgaccaaagttcataatagccgtgccatgtgagatttcttcatttctcaaagaattaattcctgtagtatttatcggcatcatgagtaaagaaactgaaaacattctaattgcatatacgactattaaatacgtataagatgtgtctgtatgcaagaaacacaacataattgtagtaattgttaaaattgtaaaaccagtataaatcaatggtctaggaccatacttatcataaaatttacctgtaaaaactgacataataccatttattattgcaccaggcatgataacaagtcctgataacaaggcagataaagataaactattttgaacatatagcggtataagcagcgcaggtccaaccattgacatcattataatcattgaactaatcgtacataatgcaaatgttctatttttaaaaacccttaaatttaaaagtacattagtaatattaaattgtctacgtataaataaatagataataaccatacttattatcaacgcacctattactattggacttgtaaatcctaaatctcctgcactactaaatgcgtatagcattaacccgaatccaatagttgaatacattactgagcgcttatctaatttcgtatatttcacttcattgtaacttgagattgaaactaagccgaaaacaaaggcaactaaagcaattcctacaattataataaatggtactcgccaactcgcttgatcaataattaatcctgtaactgtagggcctattgctggtgcaaattgaattactaaacctgctagtcccattgcaaaacctcgatgttctttactgaacaatgtaaataacgtaaattgcattaagggcataagtacgcctgcacccatcgcttgaattacacgtgctaacattaaaactccaaaattcggagctaaggctgcaacaatagaacctaataaaaatgtccccatcgccgctaagtataaaggtctagttttaattctatccattagatatgccgtcagaggtatcatgacgccattaacaagcataaacccagtaactagccattgcgatgtactttcattaatatttaattctctcattatactaggtaacgctgtatttaataatgtttgatttaaaatagctacaaacgcactaatcaacataacagcaactatgaagtttcgtctccgggttgttaattcaactttagccatcataattcctcctttttaaaacagatatacacttgtccctttaatacatatagccattaacataatgggagtagtactcaaatgataaagaagcactacataataaatcattattggttcttacacattaggcacagctaatgtgtacttaaaaaactaacaatataacattgtagggcctaataatttattttatttctcagactcatacaatggttatttaacttatttaccacaaattgagcactaagactcactattatcgattcttctattgaacaaaaagaagttggaacacatatgtgccctcaacttcagatatctattttctattatttaaatttttactttcagggtaaaattgaagcttacaaacatataagaaccctataataaccatgatgacccaaaaatcgatattgatataaacataatttaaatgaatgatgaaataaaataacgttgttgcaactgtgtaagaaatcaaatgaaaagtcgcgcctctaaaatatgcattttcaggcaacatttttctaaaataatccattaaatgctcgactgcaaatatgatgaagtacccaaagattatataactgccataatataataggttatcgtacatacttctattatatgtaaagtcacccaacctaaaataaataagtattctacttaatccatataaaccaaaccctagaaatgttaaaaaaatcgcaccagaaagtacaaaaataaagagaacaatcattgtagttaacaagttataaaacttatgtttaagataattcacaatcattggcctccttattaataaaatattgaacgatttatctagtatctaggaaatttattatttcttactttaattacactacatcaattttaatcataattctattcttttgattgagatgactgttctttaaaaaatacgacccataaaacaataagcccaatgctaattacagcaacagcacttaacacattgtgtaagtttggaccaaagattcctgattgtatcgcataaagatatcccattattgttgaacctattgatgccccaagatttttagttaatccataaaatgacatcattttcttcatttgtaatgggctagtttcctcttggacaattacactatctttcgtataaatatatccaaaacttaatcctgccaaaattaacacaaatgctataagtaccggcaatttaataccaaatgaaatgataatactacttactagtaacaatgtaaatgatagtaagtaaataactttccttgatagttttgcttcaattcgatgtaaattaaaattcaatgtaatccaagctacagataaaggaaaaataaccaatccactttgcaatggagataatcctagttgttcttgaaggtagactggaatatataaattgaatcccattaaacaaatagctgttagaaggtccgttataaaaactaaagtaatcgaacgattaaattcaaccacaggtaaaaatggtgaagaaacatgtttttctactttaaataaacacattgccacaacgatagctaagataaaactcaagaaatttaaaagtaatagctgttggtttaataaagcaaacataatcaatccaataaatacataaaatagcgtgagccctttagtatcaaattttgatttagcaactgtttcttcctctggaaaatgaaatgtccatataactaatataatggcaatgatcgcaatcggtatatttatgtagaataaccaatgccatgttgcaaattctaatataccaccacctagaagcggtccaatgatactcgaaataccccaaacactgccaactatgcccataattttatatcgtaacggaatttcaaatgctaactttggaacaatttgcgataatgacatcaatacacctgatccaaaaccttgtatcacgcgtgatataattagcatagtaaaattagtacttaaaccacacataaaactacctatactaaataaaagtaatcctgcaattgccacataaataattttaaatctcgaaagtaattctcccactataggattggcaattactaatgcgataaaatacgctgtaaaaattaatgaaattaaatttcctgcatttaaatcttgtttaattgtaggtaatgcaagcgaaataatagatgattcaatcgctgacataaacataattaatattaaagctataacagttatgattgactttaatcgcatgaaatacctccttctatatatttatttataagattttatttacaaataattggttttcatatgtataaacacttttgactttcaaatcttaacgataattctattacaatacaatcccctattagaatgatttatgtaataaaaaaagcggagtttcccccagcttttctaaacgactacataaaatataagatcgcaattaaatgcaatagtgatgctattacaataaaaatatgccaaatcatatgaaaatatggtctattcttttgtgcataaaaccatgcaccaattgtataagacacaccacctaagaaaatgaataatatgaatatccatgatgtgcgaataaaaataattggtaacaagataatacctacccagcccatcactaaatagacaattaagcttaacttttggttaactttgacagctatggatttatataaaatcccccaaagtgtcgttccccataataaaataaatactgtccaacctatccaaccacctacaactgttaacaaaataggcgtatatgtaccagaaattgctacgtaaatcatactgtgatcgataatccttaaaatatatttatgaggtgtttcattttgcatagaatgataaatagtagatgaaataaacatcataaagatagaaataacataaatagacatactcacagacgcaagcgtaccatgtgcaatataactgtgcacagccgcatagggtaacactaataatgttaacaaagctgcaacaccatgagatgccgcattaccaatttcttctccaaatgataaagggatgatatccttaaatgtttctacgattgtgtcattactttttttagttgatttggacatcatagtcaccgcctatcattaaattaaacccattctacgtaaatcttctgttgcagttgcaacactatctttaccttctttatttttaagaggtgaaaattcttcttctctaggaacttgtaacgtgacaaaactagttccataagtaaatatgtcaaaatagaacaattcgaattttaaagttggttgttcaataaccccaaagttctcatctaattgtttcaaattcttaatagctaaatgataaggtaactcacgatttacagcgtttaaaataaaaccaagtttaaatgcatgaataccgatattagcattgttaaattgatttgcaacttctggatctaattctgaatactccagtactgtatctttacaatcgacattaactaaacgtccaacactttctcctggttttggttgaatcgttttagaagtaatatcgtaatcatgttctaccgtaaatcctgcaaatagtggatccaacacttttactaaaacattgtcgatattattcaagaaaatatacttaacgccattattagacatttcttctaagtatcctgccttgtctaaagatttaaacacgccaccattaccattcggcgtttccataatacgaccctgttgatttaaaattaacttcccttcttcactaagcgccacaatattatcttgtttaaagaaatggattgcttcttgatcatatccaaaataactatgtgcttcgaaataagctaaagtttcttcatgattgatatcacttgtcataatataccattgaatcgtatgtccagattgatgattcaatgtttttaattggttagcttgaagttcaaataaacttacaccttcaatttcaaacgaacctttagggcccttgtaaccaagtcttgttccttgaccacctgccatcaaaagtactgcaaattgtccttctttaatagcttgaagtccttgttcctctaaacgcttaatctcatcatcactcatttgtgatttaatatcatatttcacttcagaaactgcagatacatcatctattgttttcttattgatgtataaatcgttatataatttggcaataaaatctaaatctaatgacgctaccttctcttcaagtgcttctttttcattgttactcattattttttcatattcacacaaatgatcttgtttatatttagctaattgatttttatctagcattttatgcctcctgctgagtttgtaacctttaataatttattttctataaaaacttagtattccagttgcttattatatcattgatgaaaggctgaaataaaacataaactgttccgaccattaacgctgtagctaaagataagtctacaagtccacctgttttaaattgaatcggtgtcttcacattaaacggtaacggataaaataatttcacgcctcttggtgttatcatatctagtataacatgtgacactaacccaattataattgctgccatataataattaggcgtctgaataatttgcaataaaaatgctatgattgcgataaataatattgaatgcgtaaaggttcgatgtccaaagatcaatctcacaaaaaaactaattaccttaaaccttctgccaatcttactttgagtgtgacatatatcgggtaataagctagctagagttgctagaatgataaccgtaaccgacgaaaaaatatccgtttgaaaatattgtgttgttagcgctccaacgagcatgccacatgaagcatgtgttttacctgtcatatttgttctcctttaatactcacattttaccacatccctaacaaaaacacgaacatattttcgggttaaaattcattagtatgacacaatttaaaaaagtatcacataactcttgaaaacgattacaaaatcgtttatgatgtatttacaaaatatttaaaggatgtgtttgaataatggcaatgacagtaaagaaagataataatgaagtgcgtattcaatggagagttgctgatatcaaaattcctacaagtgaaattaaaaatattacacaagaccaagatattcatgcagttcctaaattagacagcaaagatgtatctagaatcggctcaacgtttggtaaaacgaatcgcgttattatcgatactgaagaccacgaatacattatttatactcaaaatgatcaaaaagtttacaatgaattaactaaataaattgtataaaaaaatcattcatggtgagggcttcatgaatgatttttttaattgattcaacacccagcataaacaaatacaaaaggacaactgttctcataattttaacagttgtcctttttcacatatatttataacaaaagatgtgccatcaaagaaataattggtagtgtaatgattgttctaatcaagaaaatcataaacaatttgccgatgcttacaggaatcttcgaaccaagtatgacgccacctacttcagacaagtatattaactgcgatatactaagtgccccaataacaaaacgagttatatcattttgtacaccttcaattaatatagaaggtaaaaacatatcggcaaaaccgataataatcgtttgagaagcctgtgccgcttcaggtatttgcattaactctaaaaatggaacaaaaggtttacccaatatgacaaaaaagggcgtgtagttcgcaataatggtagcaatagtaccaatactcatcactacaggcaaaataacaaaccacatatcaatgactgtttttaatcctgacttaaaaaagtcaataacgcccggtgctttaataccaacttctgttgcagtatcaaagccatgtctcaatgccgtctttccttctggcaatgcctcagtacgcgcactttcaggtacctccttagcatactcatcaggaattttatttaaaggccaaattcttggcataatgactgctgcaacgaggcaggatactatcactgataaatagaaagcaaaaaattgattttgcatgtgcactgtttcagcaactacaattgcaaaggtgatagaaactacactaaatgtcgttgaaataactgttgcctcacgacgagaataatatccttcaccatattgtctacttgtaattaagacaccaacagttccgtctccaataaatgatgctaaattatctaccgtcgaacgtcctggcaatgtaaataaaggtctcataaccggtctaaaaataggacccaacatctctaacaaaccgtattccattaatagcggtaaaaatagagctgcaaataagaatactgccactaatgttggcaataaacttgagaacaataatccacccgtttcatctgagtaaataacctttgaaccaattcgtaaaaatgtcatccatgcaaaaacaactgctaatattcgtaaaattaaccaaccaattctaacgttaaaagcattgttcattagcccgtcaggtttcaatttatcttttaaaatagttgaacaaatcagagttatgatacccgataaagtaattatcgtcacaattaaaaatggcattacgccacctaatacatctttaagcacgcctgctaaaaatgctacgggcaacgttgtttgcttctgtccatcttgttcgactggaattggtactagaaataataagataccaattaaagacatcgtaataaacttaagtctcccaataactatctctttccttgaaaagctatccataaaatcaatccatttctctatgtattcgttttaagtatatacagaattctattcagttaacaaacatattccttatcattctatctttcaaaatgtttatgtatgcaaaataatgaataattacagttattaaatatacgctattacttgtaatttttcaagatgaattcaaaaaaggttaagtacaattactgatttcgtacttaaccttttttaaactctaatcatatgttagttatttcattcttcgtaataatattaagaagtatggtgcaccgataattgcaatgataacccctacaggaatatccagtggcggatgaatgccacgggctaaaccatctccaaatgttaacaatatagcaccaattaaccccgacatgataataacgtgtaatgttttatttcctattaattgtctcgcaatatgaggtgcaattaatcctaaaaagctaataccaccgacaactgaaattgcggatcctgctaatattactgctaaaattagcaatagcattttaatagttttaacttttaaaccgagtgcggttgcaacagcatcacctagattcaatacatctaattgataactcaataaaatgatgattggtatcgttattaaaaaccaaggtaatatagtataaatattcgacatatcatgtccatatagactacctgtcaaccaaacaagcgctttgtttgcttccagtggatttctgattaataagaactgcacaatcgccgtacatattgcgcctattgctaaaccaattaaggcaagctttgaacctttaacatcatattttgaaattaaaaatgataaaaataaacttactgcaaaggcacctaagaatgaacctataggtaaaacaaacaatggtgctgttggaaagatcataataataattacagcagctaaactggcacctttagaaatacctataacatcaggtgaggctaacgggtttcttattacagcttgtataattgcacctgatatagccaagctactaccgataataataccaagtaatgttctaggtatacgatactcatttaaaataaaatcatcttgtgtaaagattcccttaatagcatcaatcggatgaatcatgacagaccctacacataaacttatgaatatactcacaattaaaaggattgtgattaaactataacgacgtataattttcgttgtcatcatattcttttcacccctttaatcgttataaataagaagtaaagtgcacctacgaatgatgtcacaatacctacaggtgattcgtaaggataagtgattaaacgacttaatacatctgatagtagtaacaaatctgcacctataataaatgttaatggaatcatgactaaataattcttactcacatagcgtttgactatatgcggtacgattaagccaacaaatccaattggtcctgccactgacaccgacatacctgtaagaataatgactaatagcccaatgataattctaactttatttatattttgacccaatcccttagcaatgtcatcgcctagttccataatcgttagttgacgtccaataaaaatcgttacaattaaagcaccaataatccatggtaaaatggttaaaatttcatcccacttcatactggataatgaaccgacaagccaaaacatcacttgttcgtttgaattctcattcaaaataataataccttcagtcatactactaaaaaacaaatggatggccataccagccaatgctaatttaatgggtgtcatacctttcgtagcacctgaaagtgtataaacagttaaaccacctataaatgcacctatcacacctaaatataatgcataatattctaatgatggaatgataatcgtcacaaatacaatgaaaaacgatgcaccagaactgacaccaaaaattttaggtgatgctagcggattgcgtgtcattgcttgcattaacaaaccagataccgctaatgcaccgccaataaataaccctgcaatcatccttggcatacgtacattatgcaataaaaacgttgctttcgtatctgtatgaccagtaacatagtgaatgatatcgctaaaattaattttcgaagaaccaatcgccatatttaaatatatacaaataaaaagaaagcacaaactcactatatacgtgagtgttgtgcgtctttttcttttatgatctatggcagattggctacttatttcttttatagccatttacttccaccttacttttgttctttttttgataattcaacaagttctttagccatttcttcagaagaaattaagccacgagatcttgcccaaacatcacggtcaacaatatccacgcgattatttttaactgcattcaactttttccatgttgcatcttcttgtaacttcttgaattcagcagaatcttttttagcatgatctgtcataatgatcatacgctctggatttaaatcagctaaatgttcagtgtctaattgtaagtaaggtcctttcaaatatttacttaaaccttttgttacatcgtcacttaatgcatttttaaatcctagttcgtttaaaaattgtccaacatatgaatagtttggatgtgctaataaaccagctttagcaactactgctggaagcactttttgatttctatcaaatttaatttcatctttatacttattgattaatttatcatgctcagcaagacgtttttcgccttctttttctttatttaaagctttagcaattgttttgaacgaattaatattttgtttgtagtctccatcaaaactctttaatgataatgttggtgcaattttgtttaattctttattaatacctttatgtctactgctatcagcgataattaaatccggttttaatttactaatttcctctaagtttggctgtttacgtgtacctacagaagtataatccccaattttttctctaactggtttaatgatacgttttttcttaccatcatcagcaataccaactggtttaacgtctaatgctgctaatgcatctgcaaatgagtactctaatacaacgatacgttttgcatctttaggtacttttactgtaccattttcatcttttaccgaaatagtatctttagttgatgattcttttttacttgaattatccgtattaccacaagctgcaactaaaagtaaggcaactattaatcccaatatactaaaagtttttagacctctcatcgttccactccttaatatgtataacttcatttattattttattgataacaattatcattgtcaagtagcgttcaatcttttttatattcctaaaatgtatgactatatatttcctctaataattatgactacaattagcacatttccttagacaaaatactgataatgtatcattgctatatcatctttgcattaatacaattgacaccatttagcatgaccgttatccctgtaattcagctgatattatctgttgcaattttatgtgacgaactgttgcacttaatttgataaatcaacaaatacaaaaaatctaagttgaacaattatgatacaaccgtgcaaacgatatgtagtataacttgtcaacttagaattattgataaatatattaatattggtttaccatagcaggagatttcacatcaaaattttgaagtagcgtatcaatctttgaatcatcaatatataccttatgtaaatttttcatatacatcgaatgagaaagtgcttcataatttaatgaaaaagatatatgatctccaacttgatagtgtccttgaccatttaaatcaagcattaaatgatcactcgaagcgcctaaaatattgatatgctgatccataggtgaaatattatcgacttttgtatctaaataaccaatatctacaatagcttgtaagaatgattcatgcgtttgtgtattaactcgaggtttaatttctaaaatctcagcctccaatgtaatcgcatcttgatataacatagcgatcgcttgatttgtcgttgtatcaacacctctaaacaacgtttcacctattcgcaattcatttattttacccaaatcattatataaaagttgtggtaacatgctcgaattaccacctgaaataattttcaatcgatatcctatttctctttcaacagctgagacgaatcgattaatcataaagatatcatcatcacttggcgcatcagatttaaaacacataaaattgaatgctaaacctacaaaatggatatttttcaagtgaataatctctttaatataatctaaaacatcataagtcagaacaccttcacggccatctttccaatctaccattaataaaatcttatgtttttttcctaaaacttctgctacttcatttatttgatgtatggtagataattctgtttggatactcatatcaactttttctatcatatctgaaatctcttttttggcaggcgtacgcaataacgtatatgttaaatcctgatctgcaatactaattatgttatccaatctggattctgcaacatgattgatacctaacgcttttaagctttctacaattgtacggtcaccagctatacacttaattactggtgtgaattgtatatttttactttgaaaaactgtttgaagtactttggcgttatatttaatcttcgatatatttatgttaacgtgtgccatgtagtactacacctctttttttatcggattatctaactcaatatttaaatattgctttactttattttccattctcatatttaacaacgctttgacagtaattgttggtccaaacaaaatatcttttaactcatttgcatgtggtagtgttgggttaatagcatgcgctactacttgctgtactatgttaaataattcggtttcttcaacacaatcatactgattaaaatgatggattaattctgccatttgattttgaataacagcatgttggaattttgcaatcactgcatctatagaatcagctattaaactatcatttgtaattttaatatctgatacacgatgttgtaatgtttctaaatcaattctagaaccacctaaatctctcactaaaaattgaatgtcaaaatgtggccccaagttcactactgtattttgcatgtgtgcttctaatgcaattccataattttgaataaaagcaattaaaggcgggattaatgcttgagcgtatcgttcaataaatgtcgtaatactttctttagtaattccttgatttaaccactctaagtaactatccacgataactttttgatctattggatttttattaactagacttgcactaactactgttgcaccttttccatcaatttcaggcttttgtcttataatacaagcaagctgacgtgccctatctttatcaacatttgcatattcaccgaacggttccatagcaactttaaatcctggatattgattcaacatgttttgtaaagcataacttaactttggtccatctacagtagtcacagttgagactgttctaacggcacttgttgcttgtgcatcgacgggcaacttaacatggtatggtttatcaattaaagacatcgtcctaaatgataaagttgcttttgaaagtattgtaaacggcgttggaattaatatttttttagcaatccatgcttcaaaatatttccctatcgtatgatcatattgccaaggatgtactaaaatcgctctatagtcttcacttttcaaacctaaactctttaaaaacacacgaatctgattgtagtattcgggaattatttcatcaataataaattgatcattaccatccatagctgtgcacacaacatgatctttttcaatcatcataatttgcaaagggatttctttttcaaactcaggtgcatatgctcgtacttcttccatagttaagggcaatttcgttttggttaaagggtgtgttggatgcccctctggtaccaagctctcagaataagttaaatcatctgtcttatcactatcttttacatgttgtaaccatgaaaaaaagttaatatcttgtggtaatcttgaaaatttaaaactttgacttattaatgtttgtctgtgagacatttgcttatatgtttcaactaaactatctcgactgtgtattaactcttcgcgtagtcgctctgaaatagggatatcaaagtcatgattcaacacatctaacaaaccttctaaagttataattaatgacgtttcacctttatttaaataagtaatatcacctgtaaactcatagcgttctaatgcactttttctaacaacttcaatagtcaacacatgcatatgatactgaatttcaattaaagatcctttttgcgaaataaatgtttgctcggggtaaatacgttctttaataatggcgttaattacacgatattgaatatttctatctgcctttgcccattcaagatataccatgattactttcctccaactttaacttcaactttctatttataaaatagaataccattgtaatgcatatagtacttattcccattattgaaaaagttctaacaatgccaaacacatctgcacatatactcattaacagacttcccaatggaatcatacctctatccatcataataatactcagtactttaccacgttcataatctttaacattattttgaaaataaacgcgatttgtcgtacgtgcccattgactaaataacccaatcaatgtaatacaaatgaacatgatgacaatattgtgaaataccacacctaacaaagcaatgccaaataaaagtgaacttaaataatacatatttaccataccaatatatttaagtactttaggtaaaactagcgttgcaataataccaccaatggcacacatcgtcatagcgataccaaatatttcagatttccccggaaatactttgtttgtcaaaactggtaaaagtgtcgtatatgaaaaacctgtcgccataatcaataatgatgttataaatatttgtcgaccttccatatgtaatttgaagtaatctataataacttttaacggcatgtatcttgttgcatcttcaggtattttagttactttaaaatgtaatggtaagcataataaagctgcgataaaataacaaattgcctgtgcaagaaatgttgttggcgcatgatagactgctaatatgacaccagcaatggcaggccctattgaacgacaaatattaatgatgaatgaatgaaatgatacagcttgtgtagtagatattttatctgataaatctggtaagattgcttgtcttaaaggtgtttcaaccgcacttaaaatccctcttaatgtcgcatatataataatgacgctaattggaattgcagtgaaactatacgtgagcacacataaaattgcagttactaaaaatgatgatgaaattgtaattctcagcaatcgccctttatcatatttatcggcaattgcccctgcccacacacttagtaataatattggtacaagtctgcaaaaattgacaatccccagataaactgcgttatgataagtggtaagtacaaaccaatttagccctatttgtccaatccaattacctagaaatagtagaaaagaactgctaaaaaaatattttgtcataaaacttacacccgcattctgttgataataagaatcattatcattaatatggattatacaaatctatcttgcttttgtaaaatatttcatagaggtgaattatgaacttgaacttaatttttaaagaacagacattaaaatttaacaaagaagaacaagaaacatatttatttttacaacaacataatagcgattgggctaatatttttaaagagatgattttacaaggaagagataaagtcactcagagattagtcacatcaatgcatcgcgaaaacttagttaaagcgcgcactcaaagtaagaaaatattgagtcgtgatttgattatgttagatatctcaacgactcatatactagaaatccagttcccacaagctaagcaaacattatatgctcctatcactggagaacacgcctttgatcgaattgatgttgaaggccctttctacattaaaaatgacattacaaatacgattacacgagtacaccatccaaatgaaattcttgagtgtattttaattgaagcaccagatttaaaaaatgctgctagtgatcaatttcagcaagatttaataaacagtgcaactaatatgacatttgcaattagctatcaagcactgtcaatgcaacatgattctgcacctttatttaatattatcgaaaatagcgaagatagttacttgcgttcagagcaagccgttattgaaggtcatccgctacatcctggggctaaattacgtaaaggtttaaatgcattacaaacattcctatattcttcagaatttaatcaacctattaagttgaaaatagtactgattcacagtaaattaagtcgtactatgtcactgtctaaagattatgatacaactgttcatcagctatttccggacttaattaaacaattagaaaatgaatttacgccaaactttaactttaatgattatcacattatgattgtacatccatggcaattagatgacgtattacattctgattatcaagcagaagtagataaagaattaatcattgaagcaaaacatacgttggattattatgccggtttatctttcagaacattagttcctaaatacccagctatgtcgccacacatcaaattgtcgacaaacgttcatattacaggtgaaattcgtacattatcagaacaaacgacgcacaatggtccactaatgacacgtattttaaatgatattttggagaaagatgtcatatttaagtcctatgcatcaacaattattgatgaagttgctggtattcatttttataatgagcaagacgaagtagactatcaaactgaacgaagtgaacaattaggtacattatttagaaaaaacatataccaaatgattccacaagaagtcacaccaatgattccttcaagcttagttgcaacctacccatttaacaatgaatcacctatcgtgacattgattaaacgttatcaatcagctgcatcattgtctgattttgaatcatcggcgaaatcgtggattgaaacttatagtaaagcattgcttggtctcgtaatcccactagttactaaatatggcattgcattagaggctcacttgcaaaatgctattgcaacatttcggaaagatggtctattggacacgatgtatattagagactttgaaggtttaagaattgataaagcacaactaaatgaaatgggatacagtacatctcatttccatgaaaaatcaagaattcttactgattcaaaaacgtctgtgtttaacaaagccttttattctaccgttcaaaaccatttaggcgaattaattcttacaatctctaaagcatcaaatgattcaaacttagaaagacatatgtggtatatcgttcgtgatgtactagataacatttttgatcaacttgtactttcgacacacaaatctaatcaagtaaatgagaatcgcataaatgaaattaaagataccatgttcgcgccatttatagattataagtgtgttacaacaatgcgtcttgaagatgaggcacatcattatacttatattaaagttaataatcctttgtatcgagaaaataattaaaattatagaattttattaatcgtgagctcaaggattacattaacttattaaatacaatctatacaaatgagagaataatacattttccatattcaaattattaaaaatcacaaaaaagctcggcactaaaatggtgtgccgagcttttttatcgaataacttattgtaaaccttgtctttcttggttattgttttcattatttttttcgtgtttttgtttccattctttttgagtcattacatcatcaacttgcatgttaacttcaacaacatctaaaccagtaatatatttaacttgttctttaactaattcagttactttacggaagatttttggtgctgattcaccatattctaaaattacttttaagtctacagcagcttgtttttcaccaacttcaacagatacaccttgagtaacgttatttccacttgagaatgcattagtgaatgtatcagttaagccacctttcatgtctaagatacctttaacttcacgtgcagcgataccagcaattttttcaacaacttcatcagagaaagttaatttatttttgaattgaggctcttgattttgttcttgttgtttttgacgctcttctctttctttttcgttaacaccagtttgattgtcgtatgcttgttttgctttattgttatctacagtcataatagattctccttttacttgttaatttttatatttttttaattaaattctaaattgatgaattaactccatcgatttaaaaaattcataaaatcttgcttacggtctttcatatacccaattcctacaccaattaaacataaaacgatgataagtactgttttccaaaaacctaacgttaagaataatatcgcgattaatagaaacgctaggaaaccaacgattctccatttaaatacttttaaaaaattaatcacttgttgtgtagagtcttgtccgttttggttatgattgttagccatgatatacctcccttacaacactcgtggaccagaagttttctgatctctcacattaacttctaacttacgtactggcatttctgtgaaatattctacattctttttaatatccgaacgaattgcttcagttaaagattgaacttgaacattatttggtacgaaaaagtcagttttaatgtcgatataagatttattttttttgttatatagtttcgcaactacatttggttgtcttacttgatcatattttgcaaccgtatcgaatgccgtcttttcaacagctttacgagatacgtaaacatgaccatcatcgaagtctttgtataatccaggttttcgatgcgtaggtttgaagatactaaatactaatataagacctattaatatcaatagtgcagcaagtgaaataagtaatggttggaaccattcaaattgaaggaagtagtcttgatattcagttatacgtccatcttggatatacatgaataacaggaaccccacgattactactattaataagccaaggataaagtttttaagtcgtttcacccctaacgacacctccttagttaaagttaatttaaaaacatattaaatatgtacccatcagtttttttcttaaacataataaattaataactttaaatttatttttaatatataagatgaagtaccatttagtaatatattccctagtttttgtaaataaaacctcattattaattaattttcgtcaatatgttttgaagaacgatattctaaaatatctgggtcacgatgtttaattaaaaccttattactatttctaggtttttcttcacttaaagattttaaaagcgaccatatcatcgctataatgaccacggaaaatggtaacgcagcaatgattaataaattttgaatcgcttgagtaccacctgtgtagatcatgataattgcaaataatgccataatgataccccaactcactttgacaaatgacttcggattaatatcacctcttgaactcaacatacctaaaacataagttgccgaatccgctgatgtaacaaagaaaatcataataacaagtaaagtaattaagcttaatacaaaacctagtgggtaatgttgtagcgttgcaaaagttgctgtttctgtcgctgctttagcaatatcggcaatatgattatcttgtaagtaaattgctgacgcgccgaataccgcaaagaatataaagcaaactaacgccgggacaaaaagtacacctagaataaattctttaatcgtacgtccttttgacacacgtgcaataaatatacctacaaatggtgcccaagatatccaccatgcccagtaaaagattgtccaattttgtaaccattggaatttttgaccgcctgacggaatacgtaaactcatactaaagaaatttgcaatataattacctagaccatttgtaaatgtatttaaaatgtaaagcgttggcccaacaataaaaagaccaataagtactacaaaagcaagtaacatgttgatattactcaacgttttgatacctttatcgatacctgaccatgctgaccaagtaaataatatggttgcaatgacaatcaagattacttgcatcgtgaagttactcggtacattaaataaaaaatgtaaaccttcgtttatttgcaatgcaccgaaacctaatgttgcagcaacgcctgttactgtagctatgactgccaatacatcaatggcaccacctaaaggtccacgcattgccttttcacctaataaaggcgtcaatgtagcgctgactaagccaggatatcctttatgaaagctaaaatatgcaaacacaagcgcgacaataccatagactgcccatgcatgaatcccccaatggaaaaatgaaaactgcattgcatcattaattgcagattgcgtgccagctttatgaataggcgttaatttgaaggcatgactgattggttctgccgttgtccagaacacaagtcctattcccataccagcactaaataacatagcaaaccaagacggcaatgagaattcaggatcttcgccttcttcacctaatgtaatgtttgcgtatctcgaaaataaaatatacacacagacaaataaaataactaaaacgagcaataaataataccaagaaaaatgtagcgcaataaatgtagtaatgttttgcgtgagtttttctaattgtttcggaaatattgctccaaaagcaacaaatatcgtacatatcactaaagatacccaaaacactagacttactgatttatttttcataaatacaaaccctttctgtgtaatggtaagttcatacccataactgcaacattttaatcatttgtaattttatatagacacaattaataatgcctcatcttttaaaaatgatatataaaacacactcaaattatttatcattgagcaacaaagtattttattgtatttaagtaatgcctttctagtgcattattgatttgatacctgtaaagttgccatatttccgtttagaatcaatagtcgctagacacaaaaaataagtcgccctatacagtattttctgcataaggcgactttacttactaatctatatattaattactaatttcccaatcattgattgtttttccaacaattgatgtgcttgatataagttttcaggtgataaaccttcaaaaacttgtgtcgttgttggttggtaatgccctaattctatatttttcgtaatatcttctaaatactcatgttgtttaatcatatcaggcgttcgatgaattggacgcgcaaacataaattcatgtgtaaatgttatactttttaattttaatgcatttaaatcttgatcttcattaaaagctacgatagtcgtaatatgccctaatggttttatcagttcaatcatagtattgtaatacaagtctgtattataagtgcaaaatatataatctactaatggaatttctttttctttaaattgacgcactaaatcctctttatgattcaatacgatatctgcgcccatcttttcacaccactctgttgtttcttgtcgtgatgctgttgtaatgacagttaaaccataccgtttagcaatttgagtggctatactgcctacaccaccggcaccattaatgattaacacggatttacctacattttcagaaggattatgtgaaattttaaatgtatcaaaaaacgtttcatatgccgtaataccagttagcggtagactaaccgcttcattagcacttatgttgtgtggtgcctttgcaactatagcttctgacaccaattgatatgtcgcatttgatccttgtctatttggcgatccagcataaaatacaacgtcacccggactaaataatgtaacgtctggtccgatagcttcaacagtaccaatagcatcaaacccaagtacacgaggtgcttgagtgactttcatttgacgttgttttgtatctacaggatttacactaatactatttactttgactaagatatcatcgttttctggcgttggctttctttgttcgtatactttaaataaatttccttcttccaatttaaagggcttttcaaatcctatcattttcatatcgtttcacctcatttatgaacttatttcttattatacaaaatagaagccatgtgtgcttataccgcagcatcatgactcctttttcatttgaatatataaataattacagacgactttcgtattacattttagacttatttctaccatgttactgaacaaatttgctttagataagaaagttattaaattttgatcaattaacaaagttagtttgttaaaacgtatactttattattccgttactttaataacttgtttaccaaagttatcgccagtaaataaatttttaaatgcatgtggcgcattttcaaaaccatcttcaatggttacttgtgactgaattttaccttcttgaacccatgttgcgagctgttcactagcttctttaaaagcattagcgaattcacttactaagaagcctctcatcattacttgcttcttaataagcgtaccttgaatacgtggtccgatatctgcttcaggatgattatatgacgaaattgcgccgcatactggtacacgtgcaaaacgatttaaatgcttaaatacttcatcgccaactgtaccaccaacattttcaaaataaacatcaataccatctggtactgcttgtgctaacgcttctgcaaaatcctctttcttataatcaataccagcgtcaaagcccagtgtctctgttaaataatttacttttttgtcgccacccgcaatacctactacacggcaacctttaatcttagcaatttgacctacaactgaacctacagcaccagatgcagctgaaaccacaacagtatcaccggctttaggttgtccaatatcaagcagaccatgatatgctgtttgtcctggcattcctaaaacacttaaatataaatcaagtggtacatctgtcgttggaactttagtaatttgatccgcttggacatgattaatgattcgccaaggcaacatacctacaacgacatctccttttttataatctgcgagtgtcgaatcaattacttttgcaacgacatggctaacaatcggtttaccaatttcaaaaggctgtacatacgaatctgccttagtcatacgtcctctcatatatggatccactgaaatatacagcgtttgtacaagtacaccatcgctctcaagtttaggcgtgtcaatctcttcaattttgaatgtatcctcttgaggcatgccttctggtattttgttaaaaagaatttgtttattttgcatcattaatcacctttctttatttgaaacttttacttatttgttacttaagcgttaagttttaattgtgtcttcgtgatgtctgtatgcaaatacattcttagttgttatattttgacttaagcactgattcatttaacttcaagtacattatatttgctgtaaacataaattaaaaatgttacgacttagacattttatggaaactctcaaacaatagataatttttgaaaagctctaatattacaagcttttttgccccagaaaactagcagttgctttattttttccataagaagtcgattaactcattagcaacattttcattctcatgaagctgactatgttgtgcaggctcaccttcatatttagattctcgataacttttcggactatttcccagtaaatattttaatgatttcgaagaactattagacactctgccgtctgaatgtgtaccatctttcaaatctccataaatatttagcacttcgatacctttacctttataaatatcttttagcacgcgtaattgctgataaggttgattcattcgacttggtttaccatctttatcaactgtaatttcattgacatcttcattcatatttaaaacaccattaaatgtccctgcaatattcacttgtttgtttaactgtggcagtgacttgtcgttaccatatgtcatcatatattgtgcaaatgttaagttccccattgagtgaccgacaaagttgaatttatcgaaattgtattcagattgtaacttagtcagtacatttttaaaccacgcagcattcttatccaaatagccttgtctgttattttcaagttcaattttcacaataggattcactgcatcttttcttagtttccctttaaatgtcactgcaccatcctttgaaacgtaagcagtgatgatatctttagttacccctcttttttctgcttgcttcaccataaacttttcagaattggcactaccaccaaatccatgtaagaacaatgttggaattggctttttaacaaattgctgttgttgtattttaaatgtttgtgcctgtcgttgactaaacaccaccgtaataatagagcctataataatagcgaccgctaacaacgtcgtaataattacaaaaattttcttcacacttttaactcccattcatgtcttttatataagtataaaggatgtgattaaaaatgtcctttagttgattttgaatacatcattaacttttaagatgactttggaaagttgtccgttaacgtttgttaattgattgcttctttagctttcaatggtgtgtcacccattgattaatatataaatatgtatatacttgtttaatttatctctttctataaataaagacctaccagcactcgactgataggccttttaatatctataattatttaatttcttttgtttcggctaactctttgtaccaataagcacttttcttaggataacgttcttgagtctcaaaatcgacatagaataaaccatatcgtttttcataaccatttgaccaagagaacacatccattaatgaccaaataaagtaacctttaacatttgcaccatctttaatagcatctgcaataacgttcaaatgttgtcttacataatcaatacgtgcatcatcatgaactgttttttcagattcaataaattcatctttatatcctaaaccattttcagtgatataaatcttgtgatagttaggataatctttaacaacacgcatgatttgatcatataaaccttgaggatagatcatccagtcccagtctgtgcgaggtacgtcgacatcaaattcacgttgtccgacacctttaagttggtatttagaaccgcctttatcacctgtcgcattatgcgtgatttcagattctccatcgtaacctctcatccagtcactcatgtagtaattgatacctaagaagtcgtttaaatctttggctgcatctaaaatggcataatcttcatctgtaatatttaatttaccgccattaacagataagatatgttgcacaccttccatcgtttcacgagaatacttacctaaatatgttgcatctaagatgaatttattatggatgatatcttctaattctgctgcacgaacatcttcaggatttgatggatcgaacggatattttgttggcaatgcgtgtacaacaccaatttctccttgatagccgccatctttaaataattttactgctcttgcatgagcaaccatcatattgtgatgtgattggaaaactttttcaaaatcatatttaatacctggagggaatttacctactaaatattgaccatcaccaataggtccaatttcattgaatgtagtccaatattttacttctgggaattctttaaaacaatattcagcataatctacaaagtagtcaatcgttttacgatttagaaaatcgccatctttgtgtaacacttctggtgtatcaaaatgatgcaatgttacaaatggttcaacatgacgtttatgacactctgcaaataacttatggtaatactcaacacctttagggttaacttcgccatatccatttgggaagatacgtgaccatgcaattgaaatacggataccattaacaccgaatttttcacttaattctaaatccactggatatctgttataaaaatcactcgctggttctgcagtgtaccaatagttttcttccaaatacgtatcccatgcaacacgacctttaccatctgtatttgtcgcaccttctgcttgatatgctgctgttgctccaccaaaaataaaatcttcaggtaatgttttagtcatatgaaaaactcctattcttaattttcaaattgttgttgaacgaaatcaagggctgcttggccgtctcgtgtcaatttgatatattcagcaccttgagtcttcgctaatttaatacctaatctatctgtatcttgcttaatatcttcatagttagacgcaacttgtggcgctaaaatgattaattggtactctttcataatgtccatatgtgcgccgtatccgccagctgctgctttcactggcacatgatattcttcagctgctttattaagtgcgttggctaataatccacttgtaccaccaccggcacaaagtactaagacatttgtttgttctgtgatatttgaagctttagctgcatcgtctgatacaccacttgccgctaaaattgaatcagcttttttcgtatcaaagtttgctgcaactttttcttttaaatctgaattactttctttacgtccttcttcttcatcaagaatttcactatcataaacttttaggaatgggtagtaaataataatatctacaacaatcaaagtaatagctagtacgaatgaccataaaccaaaacctgtacccatgataatgcccaatggacctggtgttgtccaaggtaaatttacactaaaactattcattcctaacacttcaacgaaaagtttgaaaatccatacgttaacaattggtgctaatacaaatggaataaagaacacaggattcaatactagtggtgcaccaaataaaattggttcgtttacaccaaagaatgttggtacaactgatgcacgtccaatcgctttgtttcgtttagatttcgtcatccacataaacatgaacgggacgaccaatgttgcacccgtacctccaaaagtaacgataaacatttgtgtacctgatgtaataattttatctgcgtgttctccagcttgaagcaacttgaagttcgcttcgatattcgcatatgtaatggctgcaattgctggctctactattgatggaccatgaattcctacaaaccagaataatgcaaaggcaccaaagataattgtgacaccaatccatccatctgctgctgtaaataatggttcgaataattttaaaataccttccgctacatttgatttaaagctgttgcgaatgactaaatctaatgcataaagaatgatgattaccgctgaaaatggaattaagtccttaaatacttgtgaaatattcggcggtacttctttcggcattttaattgtaatattgcgcttcacacagaagttataaacaataacagttacaaatgctgataaaaatgctgttaataaacctttagttcccataaatgcacttaagaatccaccatctttggctggatcagaagctaagaacaagaatccacacatcgctgctagcattgtagaaataaagttaatttgatttgtactttctagcttacggttaaatgaatctgttaaagatttcgctgtcgttcctgctactaaaaatgctacaagccccatcgtatagttatatggtttcattaaaatggcttccatgcctttatcccatttaaaaccaaatatatttggcacgtatgcaattaatagaaagatacttgagaataagatgacaggcattgcagaaataaatccatcacggatggctcttaaatatatgttacgtgataatttctcgaaaaatggcttccctttttcaatttgtgcgatcaatttttgcatcattgtcatcaccctcttttataaaattctaataaatgcttcattaaatctttcagtaaaattgttgtcattaaatggtcttgaccatgcatcatcgttacactgtatgcaatatcatcaccttgcgcttctttagctaacaggcttgtttgtgctctatgcgcttcagcaatgcaattgtttccttcttcaatcaatgcatctgcttttgcaaaatctccagcttgagctgctgtcaatgcttctaaaaacttagaacgtgcatcccctgcaaatgcaacaatttcaaaacctaataattggacttcttctctattcatagcattaatccccttttatacttattttctttgtttccaagatgtcgcagtatcttttaatactttatttaagtcatcaatatttttgaaaccagttgtacgtaaccattcacgagcagcatcttcaccttgttcaatgtatacttgaacagcaccagaccatgtagcacggccacaaagtacaccgttgaatttagcaccagcttcgtgagcaaattttaaagtttcttggaataattccgcagaaacaccagcacttaagtaaatgtatggtaaatgagttgctgcatcttgatctttaaagtgttgtgccgcttcctcttttgtataaaccacttcaccttcagcaaagccttctacatacttcatgtttactggtacttcaactttcaatacatcaacattaaagcgtggttctgagaataatttcattgcttcgttaacctttctaggcttaacttttgcgaattcaacactaccgttatcaggaatgttgtcatcgtatgttaatacttctaagaagaaaggaatgtcttctgcaacacattctgaaccgattctttcaatgtatgctttcttttgaatgttaatttcttcagcatcatcaacatcatagtaaagtaagaatttaacagcatttgcaccttgttcttttaaacgttttgcagaccactctactaaacagtcaggtaaacgacctttagcatttacgtcataaccagttttttcataagctagcaataatccacaatctttgttacgtgcatcagatgctggtaaaccgtattctggatctaataaaattgaagacgcatattgtgttaattcttccgcaaccaatacttttaattgttcaatttgagcgacagttggctcttccgtttgatgtttagccatcattcgttttaaagcaccacgttggtcaaatgctaatgcagaaatgataccttcgttattacttaattgttcaattgatgcgattttttgattagattttgacattatttacacctctaaaacttcaatttgattgaataattcatcataattatttaaattgacatatcctgtttgtgcttcttgcgcattcagcatgcctaaagtattagctttttttagtaaatcgtggtcgttttcatgattgagaattgctgaagtaattccagcaactgtagaatcacctgaaccaaccggatttaatacgtttattgtcggaatattcactctatagaatgtatgattgtgcttagcgaatgcaccttgtgcacctaaagacacaataatccactcaatcccttcgaataagggttgtgacactgcctgtttcaaactttctaaactttcatcaagtggctggttaagcaattgatatagttcagaaatgtttggtttaatgactgttggtttgtatggattttccaaaactgtttgcaaagttgcacccgagcagtccaatatcacaggcacacctttgttttggcatcgttcaataatttgtgcataataatcttgatttaatcctttaggtaagctacctgaaatagcaactgcttcaactttttctaataattgttcaaaatgtttaataaatcctgcagcctcttgattatcaatctccggtccctgctctaaaatttctgtttgttgcccttcatgtaaaattgcaatgcagtttcgtgtttcacccttaatgttataaaatgcatgcttgatgtcggcatgatctaattttttagcaataaattgacctaattcaccgccaataaaaccactcgcaaggactggctcgcctacttgcgcaagtactcttgttacatttaaacctttaccaccagctgttttacttacttcttgaacacgattaacatcatctaatttcaatgctgttaatggatatgaaatatcaacggatggatttaatgttaaagttaaaatcatatgtgtcgtcccttaatcgtggtattcgcctctgtcccatttttctaagaattcatcaaagaaatgtggatcagcttgatctgcattgcttgtttctaaatgtttaattttagcgattaattttttgttctcttcagttgctttatattcagcgttaataaatgcatcgataatatcgcacattaataactcacctataatacgtccaccaaagccaataacgttcgcatttaattcttctttagcatataacgctgatgtcatatcacgtactagtgctgaacgaacgccaggtactttatttacagcattgttaataccaacacctgttccacaaatacaaacacctaagtctgcattaccgctaacaacttgttcgccaacttttttaccaaaaattggataatgtgttcttgtaaaatcgtatgttcctacgtcaatgacttcatgtccttttgattttaaaaattcagatacacgcatttttgtatctgtaacaatatggtcgcatcctaatgcaatcttcatagtaatttttcctccttagcacattttattaagcatatctacgcggatttggtgtctaccaccatcgtatttaccttcaacaaaacctttaacgacatttttcgctaatgtgtctccaacaatttcagatcccatagtgatcattcttgaattgttatggcctctagtcatatatccagagcgttcatctgatacttcagcagcaatcatgcctttgatttttgtagcaaccataaagctacctgcaccaaatgcatcgataacaatacctaagttaccttcttgactttgaacatcttttgctacagccaaagttgcatcaacaaagtcaacttcctgtccttctgttacgtcaacaacatcatatttattgtctaataagtatgatttgatgacttcttttaatcgtttgccagcttcatctgaaccaataataatcgccataataagactcctttttactttaattttgaaatacctttcttaaaatatgacatatttatttgtagcttatgaaaatcttgagaaaaggctttcaatttgattacgtttaaattataaacataaacaaacaataaatcaacataatatgtttataatctgtttgtttatgacatattttcaaacaataagtgaacattcctattgtggtgttgttttaattaggtattcgtctgaaattgtagtaaaactttgtcgatgttcccgtttacataaatttgcaaaaaaataacccataaatgaatgcaaattcacattcacttatgagcatatagatacatattttaacaatgcagttatacttttaatttagtcgactacttcaatatatgttttaatcgtttctactttttcttcatcttcatagtccatgaccactgcagtcaattcgtttaactgacaaaatgatgtaaaatcttctttgccaactttcgtatgatcgattaacaagtatttttcaattgaattacttagtgccaattgttgcgtataggcttcatctaatgtagatgtcatcacagcacctttatttactgcgttactactaaagaacatcttgctaaatcttagtttttccaacatggcattcgccatttcacctacaaatgcttctgtaatatggcgcatttcaccaccaattaaatagacacgaaaatgtgctgtttgtttttctaacaaaattttatacaccggcaaacaattcgtaataattgtgagcgtatgatgattgacttcttctgctaatagttccactgttgttcccggtccgaaaaacaaagtatccccatcttcaattaatgatgcagctttcctagctatatatcttttttcagcaatttgacgagtatgtttttctttatgtgatatttctttatactgaaatgttgaattactgcgtgcaccaccatgaatcttcgttaaaatgcccttattttccaactcaattaaatctcttcgaactgtcatatcagacacatttaaaccttcgacgatttcattcgttcttatcgtgccctttttattcactagtttagcaatttcgtccaaacgttcatgtttattcaatgtaaaattgcctcctttatttaggcgatgggtcattatcctttatgtttagacatcaattttaatatacatgcttattctataataaaaattgcgtaaaaactaatataatttaactgttcgattatatgtataattcatttttaaaaagaactgtttaaactgcgcttttgataatcgtaaaatgaatatactataataaaagcaaaagacgttataaatcattcattattttgatggggtgtttattttgagaaatgatttagagacattaaaacatattatagatagttcgaatcgtattacatttttcacaggtgctggtgtatctgtcgcaagtggcgttccagatttccgttcaatgggtggcttatttgatgaaatttcaaaagatggactttcgccagaatacttgttaagccgtgattatttagaagatgatcctgaaggttttatcaatttctgccataagcgtttactatttgtcgatacgaagcctaatatcgttcatgattggattgcaaaattagaacgtaatcaacaatctttaggtgtcatcacgcaaaatatcgatggtttgcactcagacgctggaagtcaacatgttgatgaattacatggcacgttaaatcgtttttattgtaatgcatgtcataaatcttatacgaagtcagatgttattgatagaactttgaaacattgtgataattgtggtggtgccattcgaccggacatcgtattatacggtgaaatgttagatcaacctaccatcataagggcattaaataaaattgaacatgctgacacccttgttgtactaggttcatcactcgttgtacaacctgccgcaggattaatatcacattttaaaggcgacaatttaattattatcaataaagatcgaacaccttatgatagcgacgctactttggtcatacatgacgacatggtttccgttgtaaaatcattaatgacagagtaatcagtaggtaaaaagcatttcccgagtaacagggagatgcttttaattttggagttgcgtttttggaatttggagtttggttttcggaattcgacatttggaattcagaattataatgagtggaaaattttaattattgcgtgtttaatgacttggttttgtagcgatttttatttgatgaattgtttttttgtttaatgttgggatgctactttataacattttcaatcgctaaaggcccattcgtaaaaaattaactgtaaatcttatgcttacaactcattttattgtttatttttattgcgatttttcttactaaagatatttgtttcatcaatagattttttattactaaaatagactgtaaaaataatcgccattcctgcaaatattggtattttatgatatccaaatggtacaaagtacattgccgtgagcatgacgatgcctgtaattaaagtaataatggcaaaatgtttatatttcatgttattatcccctatacaatttattctacattcattatatacttcattttataaaattatcaatactataattattatcttaggtaagttattgcataatacaaaaattcataataacttatttgcttgctccattcactttttaagagtaataaaataacctgcaacatagactttaacatccaagtttcaggttagcgtaatgtaaattatttactttgttatattatgattaaacatctaattctctgcttgtaagtgctttaatcatctctggatcagcatgtgagaaaaattggctattactttcttctaatgtcgcaatttgttgtttatcttcttctgtaagttcaaaatcaaatatatctaagttttgagccatacgttctggattcactgattttgcgagtacaacaatgtcacgttctactaaccagcgtaaaataacttgtgcaattgatttgttgtatttatctgcaatggcctgcaacaattgattttggaataattgatttttaccttctgcaaatggtgcccaagcttctaccacaacattttcttgttgaagtgctgcaacttgttcttcttgttgatggaatggattaatttctatttggttcacttgtggttgaatttgattgtgaatacctaaatctacaattcgatcaacgccgaagttagatacaccgattgctttaattttaccattttcttttaactcttctaatgcacgccatgagccatatacgtcattgtaaggttggtgaataagcactagatcaagatagtccaaatttaatcgttgtaatgatcgttcgattgatttgatagtatcttcatagttaacattttcaatccatactttagtcgtaatgaatagttcacttctatcaatacctgaagcttcaataccttgacctacttcagtttcatttaaataactttgtgctgtatcaatatgtctataacccgctttaattgcttctttaaccgcttctgctgtttgttcttgaggaatttgaaatactccgaaacctaatactggtatctttacatctttacttatttcaatatgattcataaaatgaacctcctttatcttgtatgtccactataaaccatggagcgaactctatagcaagccagaggtttactttctctcccaaagacgttcaacattgtcatcatgattatcactagcattgattttagcaatatgattatcataattatcaattttatattttagtaaatctctcgcatcatgaattgtctttaagttttcatttaattcttcgagttgcttatttaaaatttgcttttgctgtgtttgaatatttttatttttaggaagctgcgctaatctacaaaattcgataagcgattcaatactgacgcctgcatttcgcaaatttttcactaaataaatccaatttaaatcactatcattatatattctatatccattttcatctcgattaacgggtggaatcacaccaaccttttcataatatcttaaagtgtcttgagatatattcatgagcgctacgacttctttagttttcattgcgactatcctttcagttatatttgggcatctaaagtaatgttgttttatatattgccatctttgtttgaatacttcttattttattactcaaatttaaatttgtctcttttttaacattttacatttcatcgtttttaattactttaaaaattgtataacttaaatatttaaaatgatataatcactaagattgataatatttaattttttaaaaattatttttgttgcaatttttgggtgatacggaaaatttgggtgatcgatcgtttatatgcatcaacattctttgtggattgtttgacagtagacagtcatttgtatacgttaacgaattttgaaaatttgaatcattatttaatcatattattaattgcgcacgcacaacataaaaaggagacatgtcaatgacatatagaatgaagaaatggcaaaaattatccaccattacgttattaatggctggtgtgattactttgaatggtggtgaattcagaagtattgataaacatcaaatcgctgtggctgatacgaatgttcaaacgccagattatgaaaagttgaggaacacatggttagatgttaactacggttatgataagtatgatgagaagaatgacgcaatgaagaagaagtttgatgctacggagaaagaggcagagaaattactcagtagcatgaaaactgaaagtggaaggacttacttgtgggatagtgcaaaagatttagataacaagtctgcggatatgactcgtacctatcgtaatattgagaaaatcgcagaagcgatgaggcatcctaaaaccactttaaatactgacgaaaataagaagaaagtgaaagatgcccttgagtggctgcataaaaatgcatatggaaaagaaccagataataaagtaaaagaattgactgagaattttaaaataactgattcatcaaagaaaaaagctttaaattggtgggattatgaaattggaacacctagatcattaacaaatacgcttatattgctgaatgatcaattttcaaatgaagaaaagaaaaaattcactgcccctattaaaactttcgccccaaaaagtgatgaaatattatcttctgtaggaaaagctgaacctgctaaaggcggaaatttagtagacattgctaaagtaaaacttttagaaagtattatcgaagaagataaagatatgatgaaaaattcaatagattcatttaataaagtcttcacttacgttcaagattctgccactgataaagaacgtaatggattttataaagatggttcatatatcgaccataaagatgtcccatacactggtgcttatggcgttgtactcttagaggggatttctcaaatgatgccgatgataaaagaaacaccttttaatgataaaacccaaaataatacaaccttaaaatcatggattgacgacggatttttaccactcatttataaaggtgaaatgatggatttatcacgtggtagagccattagccgtgaaaatgaaacgagtcactcagcatctgcaactgtaatgaaatcattgttgagattaagtgatgccatggatgattcaacaaaagctaagtataaaaaaattgtcaaaacttcagttaaatctgattcaagttacggccaaaatgatacattaagctcttattcggatataagcaaaatgaagtctttaatggaagacagcactatttctactaacggtttaacacaacaacttaaaatatataatgacatggatcgtgtcacctatcacaataaagacttagactttgcatttggtttaagtatgacgtcgaaaaacgtcgcacgttacgaaagtatcaacggagagaacttaaaaggttggcacactggtgctggaatgtcttatttatacaatagcgatgtgaaacactaccgtgataacttctgggcgacagctgatatgaaacgtttagcaggtacaacaactttagaaaatgaagaacctaaaggtacggatgttaaaaagtcgagtaaaacttttgtaggcggaacaaaattcgatgaccaacatgctagtatcggaatggattttgaaaatcaggacaaaactttaactgccaaaaaatcatatttcatattaaacgataaaattgtcttcttaggaactggcattaaaagtactgattcatcaaagaatccagttacaacgattgaaaatcgcaaagcgaatgggtatacgttatatacagacgataaacaaacaaccgcttccgataatcagggaaccaattccgtctttttagagtcaaccaataaacctaaaaacaatataggctatcattttttaaacgaatcgaaaataactgtaaaaaaagaaagtcatactggtaagtggagtgatataaataaaagtcaaaagcaagacagtaaaactaatcaatattatgaagtaactcaaaagcattctaatacagatagtaaatatgcatatgtgttgtatccaggcttatctaaagatgactttaatacaaaaaaagataaagtaactgtcgttaaacaagatgatgacttccacgttgtgaaagataatgaatcggtttgggctggtgttaattatagtaatagcactcaaacttttgacattaacaacactaaagtcgaagttaaagccaaaggaatgtttattcttaaaaacaaagatgataacacttatgaatgtagcttctataatcccgaatctacaaataccgcttcagatattgaatctaaaatttcaataactggatactctattacaaacaaaaatacatcaacttctaatgaatccggcgtacactttgaattaactaaataagcaagaaaatctcgacactataccatttttatagtgtcgagattttataagtatcgccatcattcaccttgtaatccgcagaccacatcccctttgataagttctagattatttaaaaatcgaattttcaaagacgtacatgcttcaatattcttatcattcattacttggaaatgtatatgaggttcagtagaattgccagaattcccaaccttcccaaggaagtcaccatatttaacattttgcccctcattcacaatgattgaatattgttgtaaatgagctattaagctatactcattttctgcgtgcttaattacaatataatttcctaaaaactgtgattcattcgtacttccaatactgttgtcttgaaccccattcactactttttcaactgtaccatttgctggcgcaatgatatcttttccaaaacaaaaataatcagtatttacttttccttgattcttatatgttttatgattttctttaataactaaatcaatagcatacctttgatgtaggtataaatagtgataattatataattcattatctccaccccaaaaaacctcatagcaatctgttgtcggcactgcgtattttaaagtcgtttcattcttaatcgcatcataattgattaacggacgcataacaaatccgataatactattatctttccaagtcactgccactccaaattgatttgctttatctatccatatttgctccatagtatcatcattttgagtacacacttttaactcatgtacatcagactgccttgtataagatttgaaaagtttcctaaactgccaataactaaactctcgcttcaaattttgatcaaaaatcttatatattttcctgctcttacttttatttaaataatccccaaagtttgttttattcatatatacttaacctcttatattaattttggtatcaattctttctccagttcctgcgtcatttttgcgctacctgaatcgtctacacttaattggacaaatcaacatataaataattttttaaaactaaagtgtagtctattcaccatattttctaatcatcccttaaatattaatatttgcacttaaaaagtatacatatcactcaactaatcaataatcatacttaccttcaacaaattctttaacatgcagtgttatcccttgataatatggatattttgttaatctaaatttctgctttaatgcttcatctctactattcgacatcaaatatgcatgttcaagatagcttaaatatgcttcgtcattgccgctatctccaaaacctaatattgattttactggtatattgtattttttcatcagaaattgagtagcatataattttccagcatttgacggtgtgaagtcaatatcatacgcattttcaggatcaccagctaatggattgcttcgactaaatctcgctgtatagttttggtcatttgcgtatctgacaagtgcttctaggatacgactatcattgttgtgattacctgttgaatgaaaataaaaattataatgtgtttcattaccttcaaatgctctttgtggaataaattcgacattatattgcgcagaaatatgacgtaatatatcttcaatatcttcaaataaaaatggttcgctcaagactttctttttatatgtttctgattcaacatattcgccattattccaagtgaacattttagaactcaaatcagaaaagatatgtaatggtttaaacgtcatattaacttgatccattttatccatgacactttgaaatgtacttcctgtcaatacagcagtgatcacttcattattattagttagtttttccaacaatttttccatttctcttaaatgacttaaatcttcttcatttgtattatgtttaaaatatgtttcatcaaaatcaaacaataatagacgctttgacatactcattcccccataatattctaatgaatttatctataacttaaatacactataagtctcaattaaaagtataagatcgactatatgcttttcatgcttattatatacaactaatgaatccctataaactaaaaacattgcttaccacttttcaaaatacacgggtcatatccctcgttaaaaactattactaaaaatcaaaaatataaaaaaatcaaaaagtatgttttaaactttatgaaacgtgttatataaatagtgtaatataccacaactttaaaaggagattgagatatgaaactaaaatcatttgttactgccactttagcattgggattattatcaacagtaggtgcagctttaccgagtcatgaagcatctgcagatagtaataacggttataaggaattgacaatggatggaaaacacactgtgccttacacgatctcagtagatggtattactgcattacatcgaacttactttgtttttccagaaaataaaaaggtactttatcaagaaattgacagtaaagtaaaaaatgaattagcttcacaacgtggtgttacaacagaaaaaattaataatgcacaaacagcaacgtatacacttactttgaatgatggtaataaaaaagtagtgaatctaaagaaaaatgacgacgctaaaaattcaattgatccaagtacaatcaaacaaatacaaattgtagttaaataataatttgaaaatgaaaatagttacacagggcaaacgctgaaaaattgcgtttgtctttttagtatgaaatgaatgatcgaacttataatttcttattgattgcttctactgacaatagattagatcggcctatactaaagtaaattctatattaatgtcttccgcaatttataatctaacataacagcaaatctcaaatatctggaacctaataaatcccctcactactgctaatagtgaagggatttattttattacttagacgtaattataaatatatttgttctattatagtcatggttaatcatatttacaaactatcatttctaaatcgcgcattatgaagtcaattttcataaaccgtcattatatttctggattcattattcagcttctctaatttcgtctgcaatatctttatagtcaatatttgctttagtgaaatctttatcttgaattggaaaatgctgttcaaatgtttctatattttggatttctactttaacatcttctacttcaaaatctaagacatgtccaccaaagttacgatcatcattcgcaaagtgtacatgaaatcctgctgatccgataccatggaataattctggtgtaaagaaaccaacgactgaacctttgacatacgtttcagtttgttcaggttgtcttctagctgaatcgattaaacgtgtataaggtggttcttgagccggcatcatacgtacatgcatttttttaaataagcctgaaatttttactgctgaaaataaattttcactcaacatcttttccttaatttctgcaaaaactgcttctgaagatttatctttcgtttcatagcttgtatctgctacaaatttagttacagttgcatatggtgttaactcgtcaccttttaattctacaaattctttatgttcatttgcatggtaagcttttccatctaaaaagattacctcaccgtttgaacctgttagtgtagcgatacctaagtcaccatgttgcaataattcatttattgatgcagttccttttaataatcctgccattaatgtgcctaatgtaccatgttggtataaaacattagtcataaaatctcccactcctctttaacatttatctttattttagttaaatacgtcaggtaacatatttgttgaaagtttgatattatctttgtaatttacaggtatatcaattaatactggaccatctgtttcatagccctctttaattgccgcttctaattcttcttgattagtaactcgtaaacctttcgcgccaaatgattctgcatattttacaaaatctacaggaccgaagtctacacctgacgaacgtttatatttcatttcttcttggaattcaaccatgttatattttccatcattccaaataagctggatgatatttaaatttttacgtacggccgtttctaaatcttgtgatgaaaataaaaagccaccatcgccagcaacggacacaacttgcgtattagggcgcacaagtgcagctgaaattgcccacggtaatgctacaccaagcgtttgcataccattgctaaataataaatgtcttggattgtaacttctgaaattacgtgccatccaaatatagtgacttccaacatcaactgttacagtagtatcatcagttaataccttttgcatagattcaataatttccactggatgtagaattccttcttcatgcgtcgctttaataccagtttcttcatcaatatgtgttcttaattgttctaattcgtctaaatgttgttgatttataaatggctcatccactttttcagaaatcatttcaatcgttttagcaatattaccaatcaactcttttttcggttgcatataattagtaatttcagcttgaacttcgtcaatattgataatttgtgtttctaattctttattccagttactagcttcgtattcaattggatcataaccgattgtaacaactaaatcacttttacgtaataattcatcaccaacttgattgcggaataagcccacacgaccgaagaaatgattttctaattcacgactaattacacctgcaccttggaatgtttctacaactggtaaattcgtgcgctcaactaatttgcgaatggcatttgtttcttctgcacttgaacttctcataccagctaataaaacaggaaatgatgcatttttaatcgcttcaatgacatcattaatatcttgttcactcggtactcctaaatttggtttttggcaaagtgatatagctttagattcaactggtgaagaaataacgtcttgcggaatactaataaaacttgcgccattttttcctgaagtagcaattcgaattgcatttgtcataacttctgataatgattcaggatcttgtacttcttcactgtattttgatgaatattttaatagcgcagcattatcaatactttgatgcgttaatcgtaataaatcattacgtttcacttggccacctaacgctaatacaggatccccttcagatgtagctgttaatagtccagtcgttaaattacttacaccagggccacttgtaacaagtactacacccggtttacctgttaatcttccaataccttgtgccatcattgcagcattttgttcatgacgagtgacaataagttcaggaccatcatcaattaaagcattaaatagatagtctatctttgcacccggaataccaaaaacatattctaccccattatttttcaaagtatcaataaccatatcggctgcagtgtactttttatcagtcatttatattcatttccttccaattgtgatgtatagatgtgtattacatgtaattacattgtgatttgtaatctaatgatagttacgcaaaattaatgatgtttatcaaaattttacatgtacgattagatttgtaatacataaaaattgccttcattacattatataacctttgttagatgaataaaaatcgttatttgtaatactaagtattccaaaaatgcatgagtagattttgtgcgttgtgattatgagggatgttggattgattgatgtataggattgttacgatattttgggatgaggtgtttagtcaatggcggtttgaaattgtcgttttatggtgggctgaaaatgctgttttatgtcgggcttgaatttgtcgttttatggagatataaaaatgctgttttatggcggtttcaaaatggtgtttcgattaataagccacagcaagacttagatctaactatgacttatacatttcacacttatattagcgattatttttatagttataaatgatagatgcagttcctaaacaaattaagaagataatcattaagtatatagaaaagttatctgttttaatataaaacctaaaaagtagaaacaccagcatcgcaacaataaaataaacaggaataaaagctttcttccaaaatatagaatctttcaattaggtcactccttattttgataatactctttaattaaggctcttgagttatcgtccggtcgttctttcccttgaaccactatgattagaacacaatcgtctggttatcgtccaccctccgcaagctaaatgacaatttaataatgtacacttttgattgtgtaaacatgtacaaattatacgtgtaaatcaataatccatagttgaattaattctattcctaagacattaaataaaggaaagtccatttatactctacacatttcatattccccacacaaacgcaaaaaaacacctcgacataacatcgaggtgttttgtatatatcgtccgacaattaacgttttaagaaatgaggtgaacgacgagctgctttaagacctggtttactttaggatttcgtatagttgcatatactgtcttaaggcatgatattaaaggatttctaatttttttgatagtattgggtttcctctaatttaacctaggggtattaaaatataataaaaatctgctggctggtggtaaatttcaaaagaaatattaactaaaatatattaattattaagcggtttaatttatccaatgtagttctatatcatcaaagtcaatattatctctgtacatgttagacgattctatattacctagtacttcattaaatttcttttgtaaactaacgcctttcttgaaatcaatcattttaataaaactgatttttccatatatactcataataaattgctgctcataatccaatgaataattatttcgaattaagtgttcttctaatccaaacttatttacaaaataaatttgcttcctgacctctcttattaaagttttaggaaccgatattttttcattaactataataccagtaactttttttctgtctcctggtttaaacataattgtcttactttcattaattctaaaattatattggtttactatttccctgataatttctttactaaaacttactttattagatccagaaatagtaatatcatcagcatatcgagtatatctcaaattatttttttgacaataagaaaagattcttttatctatattgtaaaagatgatattagctatatatggactggttggtgcaccttgaggcaactgattattcactgtacacaaatttgcgagtgctgtcgcaagttcaaatttatagcccatctcagaaaatatttttctaacctgcttaaatgtgatactcggaaaaaagttttctatatccattttcaatatatatttctgcccaacgtgtgggattgcattgttcactattgatttcctaggaacaaaaccagttgcacatttatgaacttgccttctgtacaatacattatctaaaatccacctttggatatttttgagagccatattaggaatcatcaattctctatattcatctttttttcgtttaggtattttgataacattataaaaatggtcattcacataaagacatttataaaaatagtctgatttaataccaatcatatttcttaattcttccaaagaattaattgcaagatatgtcttattaactatttcattctcaattttctccatttaattctccattttttatctaaatgagcaactcttgctaaaccatcttcttttaattattacattatttagtcgttaggggcccccctaactattaaataatataaataattatctcaaaaaatgacctcttaaattaaaataattatttatagtaaaattttcgaagaaaaatttactgtaatcaattgtataccttaattcttagataagacgactcgcttatcagacactcttgctcattttatttattaccatcaaaatttttctgctgatgtaatccgttactcttaaattcataaagtatattacttaaagttattttttctaatccatatttttttagtaattctattcctgcataagtaataatataaaaatctgtttgtttaattagaaatttttgagaaagacattcttgcaatatattgtcattatataataatatcctattaatctcaatttctaaaaatttcgatttcatatcagcatgatttttaacatacattattgctataattttatctaccaaaattttaggaacttttttatatgccagaaaccatctaataatatgaaccttttctttccatttattactaaaatcatttttagcttttcttttaaataaaggtttccactgatcattctcatgccaaaaaaggctcagtgtattatttggagtatttctaaaatttgatactaatgcttgagtatttttatagcctaagttgtagtacttacctggatttacaatatccttttcaaattcataaaattttttctctagctctttattatttataaaatatttctctgttttttgtacaaaagctatttttatctcaataccgttttttattgaagtatccattattttttttctgcatcttcggttatatgtatgcaaaatataataatctctatttttaatgttagtatatacttttttattgcatcaataaagtcgctgattgattttcctgtccctgaaaaatcatctatcaaaattaaataacttttttcgcctaaaacatttctaaaatactcgtctaaatacttttcatatccatctccatatatttccttgttttttgcaaaataatattccactgctttagaaaaattagatgatagattatttggtatattgtttgcagttaaaaataatgaagttaagatacttgaactattagttttttctgcatctttatttaatatatttgtaaagtgacaatcattgatttgatttctgtgctcttttatatgttctataagatcttgacaaaactttattaaatatttcttcgtattttcttgatcataataataatattcatctttaataatttttataatctcttgctttattacattattactattcaaaaaactttgacttagaaattttccgaatttatttctaaaattttttatatactcatcattagatgatttatttattttatttcttttattaaacttaataaccgcttgattaaattctacattttgtttcaaatactcaccacacagtgtattatattaagaacagcatgacaaaataatttttcgaatataatatataattaatttattactagtaattggattttagactattatgatgtttataaagcatctgtaagtttccacgctctgtttttccacctttactccatggtataatatgatctcctaccatatctttataattccatatatgtgtttggtgatcatattgtaaatctgtattacaaataggacaatttgaagcttcactttttcgagcattattagtttgctcttgatatttagactttttattcgcttcagtgaaagctctaattgatagttattttataaattctaatttttctccgcttaataaatactcaaaaattcctagcttccttgaaacatcactatcttcatataaacttaaaagtttatattctaatactgaaggattttaagagttgttatgatatgtttcatataaacttctctattctaatccccgcatttctttttctacattaataaaaatgctcgatatccaatctataactgagttaaagtatgtttttaaatcatttatatcattatgatgtcttgacatgtatccattaatatcacctttacttcccccatttagagcttcttctaatatttcttatctatttggaattcctttaatataactttgccattttttgctgattagcattcatagaattagaaaattcatactttgcttttgttataaatggacctgactagattgcatttctaagttcttgttgatttaatggatttgttttgtattagccattagctttctcctcttataaatatcttcactttttatatttatacttttcttcaagtatatcattttttcttcacgataaatgttctaatatttgtttttttgcaatcaaaactatactcctcatgataaaatgccacctaaaatggatggacaaattaattatatcggttgtctgtgaatcgtctacatttagttggatgtaaatgtcaatattaaaatctacataaatgattgtatagaaatgtacaaaattgtttgctaagtaattttctttttaggtgaatgattttttaatctatacgattttcctgtgatttttactacacttgaatgatgcaatatcctatccaaaatcgcatttgcgattttgggatcatcaaatatttcattttataagttgaaattgatatttgtggtaaatattgtgcttttcttctcataccttaaatctattaatttggaagaatattttggcagcttcacttccaataggtaagtacccaatctcatcaatgattaataacttatacttgctatagtgcttcaatctattttctaagctgttctcaagttttgcttttcttaaattctctttcaaatgatgacacttaataaagtaagtacttattctatttttactaacgacatttgagtctaaaaagactatgttttcatattttcctataaaacgtaaatccgtaaaatccaaaacatcttgttgattgatgctcggttgaaaattaaagtcaaaggctgatatttctttttaaacggtaacgccataacctttaccatcgattcaatcaaatttttctccttaattttgattttgtaatcgcttaatttaattaatgtgtctatgaatgacaggttgtgtttataaaatcgataacatcatcaagatggttaatcatctgattcattttcaaatattctaaatttgcttttaagcgcttataattcgttgaattattcatcataaaactatccaatcgcatttaaattatctatcgtaatctgattaatatcatccttttctctattcccaaaagaggatggcagtgattctaaataatgttctttttgataatttaatttacgttgtgtgatgagatgttcacaaatcaatttagtcttatattaaacgtgttgtttttgatcataaacttgaacttcaactgttttcccacaatattcagctgatgctgaatattgattggacttatatgtaatcatattagagcggttgactttcaaatatttatgtttcactttatatgagtttcttacattcacattcggtagtgattgtaagaactttttctttttctaaggcaataataggcattttacctgtactcacatgaactgagtagttcagtcgctctttaagattagaaataaacttaggaacctcttctaaatataatactatcagttacaagtacatcaggcacatctcacattagctcaaacgcttgtgtaaataaattaaataaaacatcactcgatttattcattgtcactttcatgattacaaaacgggagtaagaaagtagtaacacgcctatatttagtgaaactatttgattatcattcgttttaaagttaatgccttctttccagtcaaactgtgcttgatgaccggtttttgtctcgattctcgttgtacctttaggcgacatctgttgataacctttcataaaataacgattaaatacaacatgcttaaggacataagctctaaatgcagaatagacacaggttaatctaagtttaaccttcaaatattgtcaaaatacaccattatagtagaactattattcactagtgtgaaagtaacttttggatgattggataatacttgtcaataatagactgacggttcctcttcttggtcggctcaaaaccatttaattatttatcaactgttcttctatcatcccccatatgtcttgctatttcacttttgtttatttcatgattaagttctgcttaacaatttttaattttggtaaatctgtaagagtaataacttaaaaatccatatttatgtctaaagataatttcattgttgttcgcctcaataaaattatctctaggtttttaaaaattttacatgtttaaacaatcataagtgtacattattaaattataatttccagtgaaaaataaacatgtattgcaaccactaaaaaaatgtgagtatcaaagatggatagatattggtattcaaactataaataaacttttacaatggaaagaagaacaaaatctacaaaatgaagaatatggattttcagtctctagtgataaagagcaacatatcttttcaacataccatacatagtagactaaatgaagtacatgcgtgtatcgatgcctaatgacgaattagaggtattctttaaatgatattcaaatcttcataagatacacgttcatagcttcaggcatactcgtgcttcactattattcgaatcaggtgcaacaacttaaagaagtaaaactagattaggtcatagtgatataaagacgactatggacatttataaacacattacaaaatcatctagagaaaaattggcagatgaatttcaaaaacatattaatttttaggaggattttataatgaaaaagagtatttatatcttaccattagcttatatagttattgagtcacctttacaaattggcaatgttatcttaaccccatctttaaaagtaattgaatcaggtcattttcatacagacttttcactaatatcaatgtttaacaaaaaagagtttttatctattttatctacttcgcaattaaaagaagatgcactagttatttttaaggacgatttctttgaacctaccacggtagaccaaaattattattttattaataagttaagtcaaaaagccgacagaactctagatattataagaataaacgaaaataattttggtgttcctgaacaattaccaggtataccaggtattacctcaaatggttggcaagtagctgaacaattgactgaccacaaacttagaacaattaatggaaaagtcatgtttatgattcgagaaggaataggattatatccaattgacttatcttctaatatttatgaagataaattatataattgtctttatgttacttcaaatgaaattaatttacttttcagagaagctatccacagagtttctgaatcaatgtacatgaataatttaaatacatcatttgtttatcttttaagtacattagaaatgctatcaagtcgtgaatatttaaactttaaaaaaactaaatctaaaatccttccttttatttcttattctaaatatcagtatcataagtgcagtgagtatctaagaaatattagtgaaaatctaagaactgaaattattcacaatggtaaaagtatatttgatttatatgataattatgaggatgtgtacaagctattaaattggattaaattaataattattgaatatataagtaacatagttaaaaagaatatacaaacttttgatgacctcgaaaaagaaaggaaaaaaattattaattctcttggaatttaggttcaaaactttacgctccaaaaaaaaaaaaaaaagttaagcaatgtttagttgcctaacttccgatattgaatgcatcagtccaatttgatatagagccaaataattttaaaacacacaaacgcaaaaaaacacctcgacataatatcgaggtgttttgtatatatcgtccgacaattaacgttttgagaattgaggtgaacgacgagctgctttaagacctggttttttacgttctttcatacgtgggtcacgagtaagtaatccagcgcgttttaaagaacctctgtattcaggatctgcttctaataatgcacgagcgattccgtgacggatagcttgagcttgtccagtgaaaccaccaccatgaacgttaactaaaacatcatagttacctttagtttcagttacatcaaatggttggtttaagtctaaaattaatgattcgaatggtaagtattcgcgtacgtcacggttattaactgtgatgttaccttcacctggtactaaacgtacacgtgctactgagtttttacgacggcctgtgcctctatattcaacttgtgccaaagtcatttcctccttctaattaaccacgtaattcgtagttttctggttgttgtgcagcgtgtggatgttcagcgccaccatatacaaataattttttaccttgtttttcgcctaaacgagtgcttggtaacatacctttaattgagttttcaattaaacgttctgggttagttcttcttaattcaccagcagtgattgatttgataccacctggatgatttgagtgacggtagtaaactttgtcagtttctttgttaccagtaaattcgatttttgatgcattaataacgattacataatcaccagtatcaacgtgtggtgtgtaagttactttatttttaccgcgtaagatagatgctacttctgatgataaacgacctaatgtttggccttcagcatcgataacataccatttgcgctcaatgtttgattcatttgccataaatgtttgacgcataataattgtcctcctaaaaaataaatgcttctattcaagctataaacagtttcataacctaatagatgatttcatttgtttcatttttaaaacgtttaatttcatttattttgttaactgttgttcgtttctgcttatatatcttgtaacacaataagtttccggggcttatcgtggggtggatataaaacaataccgttaataatcttataatttcacaagctttttgtcaatggcaatcagtcattttgtaatgattttttgcgatgtatttttatatcgttgccaaagtcttttaataactcattttcatctaaataaatcttctctaaatatagtccttcagccggtgcagtgaaaggaacattcttacgattctttgattcaagtagcttcggcacatcagaaatttcatgtcgcccttttccaacttctattaaaaatgcaactaagacacgcaccatgttatataaaaatccagatccagtgacaatataatcaaagccatcatctgtctttacgatttcactttggtataatgttctaactttgctttctacttcagttttttgcgaacaaaaccccgtaaaatcatgtgtacctatgaattgttgcgccgctctgttcattttgtctaaatccaacgtttcaggaataaatgttttcaaaccactttgaaatggatcgcggtgttgtgcttgatatactttatatcgatagcgtttaccgacacaatcgtaacgacaatgaaaatcgtcatcgactgtaactacattattgacataaatatcatctggtaacgttcggttcattgcatattgccattgtgacataggtatattcagctctgtgtcgaaatgaaagtactgctgtatcgcatgtacacctctatcagtcctacttgaaggatggattctcacatgtcttttatgcatgcgttgtaatagcttttcaaattgttgctgtaccgtacgtccattctgttgaatttgaaagcctagaaaattatttccttgatacgcaatttctactaatatacgcatgaatttacactcctgaatattttaatacgaataaaataattgcaattgggataatcatggttaaagatatcgtatctctcaattgccatttaagctgtctgtagctcgttctcttaacattggcatcataacccctaacttccattgcgaccgctaattcttcggcgcgttggaaagctgagatgaatagtggcactagtaatggaataaatgatttaatacgtgttgcaatgttccctgaacttatttcagaaccacgcgacttttgcgccaaaataattttatctaactcatccattaacgtcgggatgaatcgtaacgcaatggacattatcatacttaattgatgaactggtaatttaaacatctttagtggtgcaagtaatctttcaaacgcatctgttaaatcaattggacttgtagatagtgtcataattgttgcaatcatcacaatcccaattaaacgcaatgatatatatagcccttctaaaataccattagtttcaatcgtgatgccatgccattcaactaatacatatccacctttagttaaaaatatatgcatcattaatgtgaagattaaaaagaaaaatattggtgttaaacctttgattaggaaccataattgaatttttgctaatctcataatgaataagataagtgcaaacacccaaagatatgttaatggtgaatgacagaaaaatattaatataataaaaagaaaaacaaacattaactttgctcttggatcaagatgatgaacaaaagaattaattggtaaatatcgccctataatcaatttatttttcatgttgccactccttatacaagcttacaaatgcttcttcagttaaggcaatatcttttaatcttgtttgatatttttgttcaaagtcatattgtaactgaacaatttctggcaaaccaatatgccaatccgccaatttttttttatctttgaagagctcttttggtgatgtttgcgacactatactaccttctttcataacgatgacttcatctgcataacgcgcgacttcattcatatcatgtgaaattaggataattgccttattttcatctgtttgtagtgactttagtaatctcattacttgtcgtttactttgtggatcaagtcctgctgtaggttcatcaaccacgataatatcaggattcattgccaatatcgatacaatcgctattttacgcatttgtccacctgacatttgaaatggtgattgtgacattacatctcttgaaaagcctaaatccatcaacagacgatgggcatagtttttggcttcatctaaattcattttaaagtttttaggtccaaatatcatttcacgctctactgtgtcctcaaataattgagattcgggaaattgaaataccattccaattctttttcttacaggtctaatatatttatctttggtcttatgtgtaatagtaatgtcatcaactgtaactgtcccagtagtcggctttaacagcgcattaatattttgtatcaacgttgatttaccactacccgtttgtccaacgatggcgtaatatttaccttgttcaaattctgtattaacatcatgaatagcttgatgctgatatggtgtccctttttgataggtataacttacattgtcaaaccgtatagtcatagttgatccaccagcccttcataagttaagaatgatgtttggtgtcccagcatttgatttattttgattgggaatggcaaatctagacctattcttgttaactcttctgcatggtcgaaaatttcagtcgctgtgccttctttatagacagtccctttattcataacgataacatgatctgcttccatcgcctcagataaatcatgcgtaatagaaatgattgtaatattatgttctgatttaacttttctcactaaatccaataaattttgacgtgcatcaggatctaacatagaagtcgcctcatctaatataatgacagaggggttaagtgctaatacacttgctatagccacacgctgcttctgtccccccgataatgcattaggttcataatctgcacgttctaacatatcaacttgtttaagtgcttcgctgactcttctatgcatttcgtcatgtggaaccgcatgattttcgagtccaaatgccacatcgtattttacaattgaaccaacaaattgattatccggattctgaaatacaattcctatgtcttttcttaacttttcaaaattatcatcagttatagcttgattattataaaaaatttctccagatttaactttctctatgccaatcattaacttggcaattgtagattttccagaaccgttatgaccaacaatagatgtccactgacctttaggtatattaaaagaaacatctttcaatgtgaaggatgcatcactttgatattgaaatgaaacatttttaaatacaataactgaattcttatcctccacttgtctctctcctttacgattcgtgtatctatcatattttacaatatttataaatcgctgtatatgacattgactgggtttgctatatattactagtattttctaactcatttctagtctttaaagtgttgtttaacaactaatgataaggacatttattcctctctaacaattatgtataaacgttaataaaataaatgatttactaatataggggtggtcgcgtttggttcaacgataatactttcacttcattcagttctagtgaaattgatcaaactagcttgatcatatttttagattcgcactcaaaaaagtagatataaagaaatcggacttaaaaacatttctgttcataagtccgatatcttattcaataaaaaagcgcgcaccccatcataagtttgttgagttcacgctttaaatctttatttagttgatggggtactctgagctagacaatatttgtatgtggcaaacattatcgttgcactcatttgctttatataaaagtagttagtgtatttatataaattcttatactaattcgataattactgattcagcaccgtcaccgcgacgagggccttgtttaaggatacgagtgtaaccaccttgacgttctgtgtaacgctctgcgatttcaccaaataatttttgaagtgcagtttgtgtagtttcatcttcgtttaagatttcaacattacgtaaagttttagctgcattacgacgagaagctaaatctccttttttacctaaagtgattaatttctcaacaacactgcgaacttcttttgcacgagcttctgtagtttcaatacgttcactaataataagtgatgtagctaagtcacgtaacatagctttacgttgatcagaagtacgacctaattttctgtaacccatgagttaacctcctttatcaatcttcttttcttaatcctaatcctaaatcttctaatttgtatttaacttcttctaaagatttacgacctaaattacgcactttcatcatgtcagcttcagatttgtcagctaactcttgaacagaattgattcctgcgcgttttaagcagttatatgaacgtacagataagtctaattcttcaatagacatttctaatactttttctttttgatcttcttctttttcaatcatgatttcagcgttttgcgcttcatcagtaagaccaacgaagatattcaagtgttcagtcattatttttgctgctaatgaaactgattcttgtggtgtgattgaaccattagtccaaacatccaatgttaatttatcaaaatcactgctttgacctacacgtgtattttcaacagtatagttcacacgttcaacaggtgaatacaatgaatcaacagggattacaccaattggtaaatcactagtattattttgttctgctaatgcgtaacctctacccttgttagcaactagacgaatttttaagtgaccacctttagatactgttgcaattttaagctctgggtttaaaatttcaacatcactatcatgtgtaatgtcgcttgctgttacttcgccttcatcacgtacatcaatttctaaagttttatcttcttcagagtaaattttcaatgctaattgtttaatgttcataataattgtagaaacatcttcaactacattgtctactgctgagaattcatgtaaaactccctcaatttcaatatacttaacggctgcacctggtaatgaagatagtaggatacgacgtaaggagtttcctagtgtagtaccgtagccacgttctagtggttcaacaacgaacttaccgaatttagcatcttcactaatttcaattgtctcaattctaggtttttcgatttctatcatttaaatatcctccttatatacgtcgacttaatttaaaatgtttgctcagtgacctgtaacaataccatcataaattatacacgacgacgttttggtggacgacaaccgttatgaggtactggagtaacgtctctgatcgcagttacttctaaacctgcagattgtaatgcacgaatagctgattcacgacctggaccaggtcctttaactgttacttcaactgtttttaaaccatgctccatagctgatttagatgcagtttcagaagccatttgtgctgcaaatggtgttgattttttagatcctttgaatcctaatgcaccagctgatgaccatgataaagcattaccgaactcatcagtgatagttacaatagtgttgttgaatgttgaacggatgtgtgctacaccattttcaatattctttttcactctacgtttacgagatacttgtttacgtgccatttaaaatttgcctcctttacctattattttttcttgttagctaccgttttaactggtcctttacgagtacgcgcgttgtttttcgttttttgaccacgaactggtaaaccacgacggtgacggataccacggtatgatgaaatttccattaaacgtttgatatttaagttagtttcacgacgtaagtcaccttcgactttataaccgtctacaacttcacggatgcgacctaattcgtcatcagttaaatctttcacacgagtatcagctgatacgttagcttcttcaagaattttttgagcagttgacgtaccgataccgtatatataagttaatgagataactacgcgtttttcacgtggaatatctactcctgcaatacgtgccatattaatttacacctctcttttattaaccttgtctttgtttgtgttttggattttcacaaattaccattactttacctttacgtttaatgactttacatttttcgcaaataggttttactgatggtcttactttcatttttatacctccctatattatggagtgacgattatttataacgataagtaattcttccgcgtgttaaatcgtacggagacatctcaacagttactttgtcgccaggtagaatacgaatgtaattcattctgattttaccacttacgtgagctaaaatctcatgaccattttctaattctactttaaacattgcgttcggtaaagtatctaatacagtaccttctaattcaattacatcttgtttagccattgattaacttccccctttttgcaatagtaaggtaatcgtcaatagacaactttattgttacgaatctatcagtgattaattttataagttaaacaaaaattacgggaattaattatcgttaattgccactctcatctatctaatatgattaaatcatgcctcacttaaaatagaccgctaaaagttgatctattacaaatgatctaaaatatcaatgacatctttggtaacgtcgctaatatcttttgaaccatcaatatttttcaatacacctttttgatcatagaaatctaaaataggcttagattgtttaatattaacactcaaacgattagctaccgtttcaggattatcatcttctcgttgatacaatttaccaccatcgatatcacaaataccttcgaccttcggaggattaaatacaagatgatacgttgtaccacatgactcacagattcgacgacctgtaagacggttcattaattcttcttccggaacttcgatattgatgacagcatcaatgtttctgtcaagctcagacataatattatttaatgcctcagcttgctcgattgttcttgggaagccatctaataaaaagcctttttttgcatcgtcttcagaaattctttccttaacgatacctacagtcacttcatcaggaactaattcgccacggtccatataagacttagcttctttacctaattcagtttcttcttttatagcttttctgaacatgtcaccagttgaaatgtggggtattgggaatttcttgacaatttcacttgcttgagttcctttacctgcgccaggtaaacccatcaaaatgatattcataagtgccctcctaaaattatctaccaccaaagcctttatattctttttgagatacttgagcttctaaagatttcattgtttcaatcgctacaccaataacgataagtaaacttgtaccaccaatctgaattgattgtggtaatcccataaacttagttgctaatattggtagaattgaaataacggctaagaagatagaacctacaaaagttaaacgatataaaactttagtaatatatttttgggtttgttcaccaggtctaatgcctggaacatagctaccttgtttcttaaggttatcagccattttttccggattaacttgtacaaatgcatagaagtatgtgaatagtataattagtacaatatatacaaccataccaacattacttgaaggatttgcagcattcgcaatgttttgtgcccattctttatctggatagaacaacgttaatgttctaggcagtaagaagaacgccattgcaaagattacaggaataacaccggctgagttcacttttaaaggtagataagttgcctgtgaacctaatctttgagcagtttgtttcttagcatattgaatcggaattttacgaacggcttcaagtacataaatagcacctacagttaatagtatcagtgacactaaaagtcctaatactttcaaccatgctaatgatgtatcttcttgcccaacgaacgcagtttgtccaaattgaattagactggctggcaacgttgataaaatacccgcaaatatgataatagaaataccattaccaacaccgaactgagtgatttgatcaccaagccatattaagaaagcagttcctgctgtcaaaactagtgctattaataaataactcataattgactgattgataatcagcgcacctttgagataattattaaattggaatgccatacctatagattggataaatgctaaagaaattgctaaataacgagtaacgttatttaactttcttctacctacttcaccttgttttgcccattctgagaatttagggacaatatccatttgtaataattgcattacgattgatgcagtgatgtagggtacaatacccattgcaaaaatagaaaatcgtttcaaggctccgccaccaaaagtatttaataactcagtggcaccttgagaaccttggggattatcaaaagctgcaggatttactcctggagctggtatataagtccctattttaaaaattactaacattgctagtgtgaagaaaatcttgttacgaacctcttttgttctaaagaagttcacaagggtttgaatcattagatcacctcgtgtgctccacctttagcatcaatagcttctgctgctgaagctgagaatttatgagctttcactgtcaatttcttatcaagtgaaccattacctagtattttgataccagatttttcattcttaacaacaccagattctactaataaagctggagttacttcagtaccatcttcaaatttattaagttggtctaagttaacaatagcatattctttacgatttatgttagtaaaaccacgttttggtaaacgacggaataatggtaattgaccaccttcaaatcctggtcttacaccaccgcctgaacgagctttttgacctttgtgtccgcgaccacttgttttaccattacctgtcgcaacaccacgtccaacacgattgcgttctttacgtgaaccttctgccggttttaactcatgtaatttcatttcggcacctccttgattatttttcttctactgttactaagtgcttaactttgttgatttgcccacgaatagcagggttatcttcaacaactactgaactgttagtctttttaagacctaaagcttcaacagttttacgttgtgtttcaggacgaccaataacactacgagtgagggtaatttgtaatttagccataactagttttccctccttaattgtataattcttctactgttttgccacgtaatttcgcaacatcttcagcatttttaaggttttgtaaaccatcgattgtagcacgaaccatgttgattggtgtgtttgatcctaatgatttacttaagatatcagtgatacctgctaattcaagtacggcacgaacaggaccaccagcgataactcctgtaccaggtgcagccggtttcataaatacgcttcctgaaccgtaacggccagtaattgtgtgtggagttgtaccttcaacacgtggaacaactactaaatcttttttagctgcttcaacagcttttttgattgcttctggtacctcttgagctttaccagtaccgaaacctacacgaccatttttgtctccaactacaactaatgcagtgaaacggaaacgacgaccaccttttacaacttttgctacacggttgattgtaacaacgcgttcttcaaattctttcgtctcttcttctctacgagccatgtatttgtccctcctttaaattaaaattctaatccgctttctcttgctgcttcagctaatgctttaacacgtccgtgatataaatatcctccacggtcaaatacgatttctttaatgcctttgtcagcagcttttttagcaattgcttcaccgactttagttgctaattcaactttagttgctgtagtagcaatgtcgctgtcttttgaagaagcttgagctaatgttacgcctttattatcatcaataatttgagcgtagatatgcttgtttgaacgatatacgtttaaacgtggcttttcagctgtacctgataagttagtacgaacacgagcatgtctttttaaacgcactttatttttatcaattttactgatcatttcaatactcctttctttagagtttatctattatttaccagttttaccttctttacggcgaacgtattcaccttggtaacgaatacctttacctttgtaaggctctggaggtcttactgaacggatgttagatgctaatgctccaacttgttcttttgaaataccttcaactttaacgactgtgtttttctcaactgagaaagtaatgttttcttcagctttaatttctactgggtgagaataaccaacgttaaggattaagtctttaccttgcatttgagcacggtaacctacaccaacaagttcaagtacttttacgtatccttgagaaacaccttgtaccatattgtttaataaagcacgagttgtaccatggtttgttctatcttctttagaatcagatggtcttacaacttcaattgtgttttcttcttgtttgaatgtcattctttcatttaaagttcttgataattcacctttaggacctttaacagttacatgatttccatcaaaagttactgttacgtcactagggatgtcaataattttcttaccaacacgactcatgttatggcacctccttattttttattaccaaacgtatgcgataatttctccaccaacattacgttttcttgcttctttgtcagtgattacaccttcagaagttgatactaatgcaatacctaaaccatttaatactttaggcatttcgctagcttttgcataaacacgtaaacctggttttgaaatacgttttaatcctgtgataacacgctcatcgttttgaccatattttaagaataaacgaagtacaccttgtttatcatcttctacgtattcaacatttttaatgaaaccttcactctttaagatttcagcaatttcttttttaatatttgatgcaggtaattctaacttctcgtgacgcaccatgtttgcgtttcttacacgagtaagcatatctgcgattggatctgtcattgtcattgattgttgcctcctttcagactcttttttattaccagctagctttacgaacgccagggatttggcctttgtaagctaattcacggaaacaaatacggcataatttaaatttacgatatacagaatgtggacggccacaacgttcacaacgagtgtattcacgaactgcatatttttgttttttttgttgcttagcaaccattgaagttttagccacttaattagcctcctttaaataattatttacggaatggcataccgaagttagctaacaattcacgagcttcttcatcagtgttagcagtcgttacgataacaatatccattcctctaactttacttactttatcatagtcgatttctgggaaaattaattgttctttaacacctaaagtgtagttaccgcgtccgtcaaatgcttttttagaaacaccttggaagtcacgtacacgtggtaatgatactgaaattaatttgtctaagaattcatacattctttcaccgcgaagtgttactttcgcaccgattggcataccttcacgtaaacggaaagtcgcgattgattttttagctttagttactaatggtttttgaccagtgatcaattctaattcttcaacagcattgtctaatactttagaattttgtactgcgtcacctacacccatgttcacaacgattttatctatttttggtacttccattactgaactataattgaattttttcattaagttttcagtaacttcagtgttaaacttttcttttaaacggttcaaagtgggatcctcctttcaacttgttattaattattagatttaatttcttcgccagattttttagcgatacgaacttttttaccatcaacaaatttgtaacctacacgagttggttcgtttgttttagggtccaataattgtacattagaaacatggattgctgcctctgtttctaagattccaccttcaggatttaattgagttggtttttggtgttttttcataatgttaacaccttccacaacgacacggtcttttttaggtagagtagcaattactttaccttctttacctttgtctttacctgcgataactttaacgttgtcaccttttttgatatgcatgtgggcacctccttatttgtattggttgttattaattaaagtacttctggtgctaatgatacgattttcatgaagttaccttcacgtaattcacgagcaacaggtccgaagatacgagtaccacgtgggcctttgtcatcacggatgataacacatgcattttcatcaaatttgatgtatgaaccgtcattacgacgaacacctgacttagtacgtacgattacagctttgacaacgtcaccttttttaacaacgccacctggtgttgcatttttaacagtacatacgataacatcgccgatgtttgctgttttacgaccagatccacctaatactttgattgtaagaacttcacgagcaccagagttgtctgctactttcaagcgtgtttcttgttggatcattagttaaacctcccttatctctaaacttgtattaaataattactgactcttcaacaatctctactaaacgaaaacgttttgttgctgataaaggacgagtttcttgaattttaacaatgtctcctaatttagctgaattgttttcatcatgagttttgtattttttagagtattttactcgtttaccgtataatttgtgtgttttgtaagtttcaacaagtactgtaatagtcttgtccattttgtctgaaacaactttacctacataaactttacgatcgtttctttcgctcacttttgtaacctcctcttacttaattattgattagccttactttgttcaatttctctttcacgagcaacagtttttagacgtgcaatcgtttttcttactgtacgaatacgtgcagtttcttctaattgacctgtagctaactgaaagcgtaggttaaaaagctcttcttttgaagatttgatttgttcttcgatttctgaagtggttaagtctctaatttccttagctttcatttgtttcaccacccaattcctcacgttttacaaacttagtttttactggaagtttgtgacttgctaaacgtagtgcttcacgcgcaacttcttcagaaacgccagcaacttcgaataaaattctacctggtttaacaactgcgatccagccttcaaccgcacctttaccagcacccatacgtacttctaaaggttttttagtatatggtgtatgtgggaagattttaatccaaactttcccgccacgtttcatgtaacgtgtcattgctatacgagcagattcgatttgacgagatgtgatccaagacgttgttgtagcttgtaaaccaaactcaccaaatgttacgtagttaccgcctttagaacgaccagttgttttaggacgatgttgacgacgatattttacacgttttggtagtaacattattattttcctcctccactagtgttcttagtaggaagaacttctccacgatagatccatactttaacgcctaatttaccgtaagtagtgtcagcttcagcgtgtgcataatcgatgtcagcacgtaacgtatgaagtggaacagttccttctgaatattgttcagcacgagcgatgtcagctccgcctaaacgaccagatacttgagttttgatacctttagcaccaagtttcatagctctagtgattgcttgtttttgtacacgacggaatgaagcacggttttctaattgacgtgcgatgttttcagctactaaacgagcgtcaagatcaacttttttgatttcaattacgttgatgtgtacttttttatcagttaacgcatttaatttgttgcgtaatttttcgatttctgaaccgcctttaccaattaccataccaggtttaccagtatgaattgcaatgttgatacggtttgcagcacgttcaatctctacgtgagaaactgatgcttcttttaattcattatcaataaatttacggatttttaaatcttcgtgtaaaagtgaagcgaagtctttttcagcataccatttagcttcccaatcacggataataccaacacgaagtccgattggattaattttttgacccacagtattccctccttaaaagttaattaagcttctttagcttcttctttaccgtcacttacgacgattgtaatgtggcttgtacgtttgttaatcgcacttgcacgaccttgcgcacgtggacggaaacgttttaatgttggtccttcgttagcatatgcttctttaactactaattcatctgtgttcatgtcatagttatgttcagcattagctaaagcggacattaatactttttcaattactggtgatgaagctttgtttgttaattttaaaattgcaatagcttcagcagcatttttacctctgattaagtcaagaactagtcttactttacgaggtgcgattcttattgttctagcaaccgcttttgcttccattaggatgtcctcctctacttaatagatattatcttcttgttttcttgtcgtctgcaacgtgtcctttgaatgtacgagtaggagcaaactcacctaatttatgacctaccatatcttcagttacatatacaggtacgtgtttacgtccgtcgtatactgcaaaagtatgtccgatgaaattagggaaaattgtagaacgacgtgaccatgttttgattacttgtttcttttcgcttccttcttgagcttcaacttttttcattaaatgctcatcgacgaaaggtccttttttaatactacgagccatttgggcgcctcccttcttattatgtgcgtgcagctttaagccgcacacccaaataagttgattatattattttttcttacgtccacgaacgataagtttgtctgatgattttttaccacgacgagttttcttaccaagcgtaggtttaccccatggtgacattggagatggtctaccgataggagcacgaccttcaccaccaccgtgtgggtgatcgttagggttcattacagaaccacgaactgttggacggatacctttccatcttgaacgtccggctttaccaacgttaactaattcgtgttgtaggttaccaacttgaccgattgtagcacggcaagtagataagatcatacgaacttcaccagatcttaatctgattaatacgtatttaccttctttaccaagtacttgagcacttgcaccagctgaacgagcgatttgtccacctttaccaggtttaagctcgatgttgtgtactactgtaccaactggaatgttttgtaatggtaatgcgttaccaactttgatgtcagcttcagcaccactttcaacgatttgacctacttctaatcctttaggagcaatgatatatcgtttttcaccgtctgcatatacaactaaagcgatgtttgctgagcggtttggatcatattgaatagaatcaacttttgcattgataccatctttgttacgtttaaaatcgataacacggtattgacgtttgtgtccaccaccatggtgtcttacagtcaatttaccttggttgttacgtcccgcttttttcggtagcggttttaataatgacttttcaggtgtagttttcgtgatttctgcgaaatctaacgaagtcatattacgacgaccatttgttattggcttatactttttaatagccattgtcgcttacctccttaatggtaattgttttattagttaaataagtcgattgatccttctttaagagttacaatcgcttttcttcttttgtttgtatagccttggtaacggcccatacgttttttcttaggtttgtaattcatgatattaacacttgcaacttttacgttgaagatttcttcaactgccatttttacttgtgttttgttaacacgagtatcaacgtcgaaagtgtatttgtcttcagccattgcttcagaagatttctcagtgattacggggcgcttaagaatatctcttgcttccattatccgagcacctcctcaacttttttagcagcagcttcagtaattactaagctgtcagcattagtgatatctaaaacatttaaaccttgagcagttgtcacttgaacgccagggatgttgcgtgctgataattcaacatttacatcttcgttttcagtaactactaatacttttttaggttgttctaatgtagataatacatttttgaattctttagtttttggagcttcgaagttgaatgcgtcaactacagttaagccattctcttgagctttgaaagataatgctgagcgtaaagctaaacgacgcattttcttaggcattttgtatgcataacttcttggagttggtccgaatacgataccaccgccacgccattgtggagcacggattgtaccttgacgagcacgacctgttcctttttgcttccatggtttacgtccgccaccgcttactgctgaacgattcttaacagcatgcgtaccttgacgtaatgaagcacgttgtaaattaatagcttcgaataaaacgctattatttggctcaataccgaatactgcatcgcttaattcgattgaacctgatttagttccgtctaattttaaaacatcataattagccattatgcatttcctcctttcacttcttattatttattaccttttttaattgaagttctgatttctactaaaccttttttaggtccaggtacgttaccttttactaagataactttgttttctgtgtcaacttgaactacttctaagttttgaacagttacagtgtttccacccatacgtcctggcattttttggcctttaaatactctagaagcatctgaagccatacctacagaacctggtgctctgtggaaatgagaaccgtgtgacataggtccacgagattgtccgtggcgtttaattgcaccttggaaacctttaccttttgatacgcctgttacgtcaataacgtcgccagctacaaaagtatctactgagacttcttgacctacttcgtaagcatccacgtctacattgcggaattcacgaatgaagcgcttaggtgctgcgtcagcttttttagcgtgaccttcagctggtttattagcatatttattagattttgcatcttttttgtatgcttttttgtcttcaaatccaacttggattgcgttgtatccatcaacttctacagttttcttttgtaatacaacattttctttagcttctactactgttacagggattaattcaccgttttctccgaatacttgtgtcatcccaatttttcttcctaagattcctttggtcatcgaaagtccacctcctaaaattgtctattataatttgatttcgatgtctacaccagatggtaagtttaagcccattaaagcgtcaactgtttttggtgttgggtttacaatatcgattaaacgtttgtgtgtacgttgttcgaattgttcacgtgaatctttatacttatgcacggcacggatgattgtgtaaactgatttctcagttggtaacggaattggtccagaaacatctgcaccagaacgtttcgctgtttctacaatcttctctgctgattgatcaatcacgcggtgatcataagcttttaatctgattctgattttttgttttgccataattttccctccttattcgtctacatttagtgatagacttctccacgaaaactatcttacacagcgccatggcaaagcggccgggtgtgtcagtaacctttcgcttcatcgcttttcttaaagtccaacgttatttatattacacgaaaaacatcgataaatcaaggcttttcacataatttttctatctgtctaacacatacttttatattttactttatatacttagtcagttcaactattttcgagatattttttatttccttctttattgtaaattcgtaccttgaatcattttattattatcattgaaaattattctatataattagtcataagaacggtggtgaatgaatatgaaaaatggaccaaaattatctttagcacttataggtatctttttaatactttgtgagtttttctatggcattccttttttaggtgcaacgtttattttaagttttggatggcagcctttactctttaatgcattactttatctaattcttactattatattattagtgaatagacaaaatgcgattagacctatagcgattattccaatatttggtatagtaggtagttttttagctatcatccccttcttaggaattttgattcattggattttatttttcctaatgattctatttgtcctagttgtattatcagcgccaacctatatacctaataaaaatgctcgtgtcatttacacacaatacaaagatggacatagagaataattcttaaaacctttttaattaggtatataatatagaagaaacacgtccaacaattttaaaagaagtatatttatatcggatatttaaagacattcataatattgctttatgttatttcgcttcttattttatccttacttcaaagaaaaaacgactaccaatcattggcagtcgttttttgtgtctggatttaaccatgaacaaatatgaagtacagaatgaatagtaccattaatacatacattatcggatgtacttctttatgttttttagagataagcattgtaattggatagaaaataaatccacacgcaataccagttgcaattgagtatgataaaggcatcataatgattgtaatgaatgctggcactgcaacttcaaaacttttccagtttatctcagcaaagtttgcagccattaatacacctaccaccactaaagctggtgtcgtaactgcacttgttacaacagcgattaacggactaaagaacagcgctaataggaaacaacaacctgttacgatactagcaaatcctgttctagcacctacagcaacacctgaagttgattcgatataagaagttgttgtagttgttccaaaaactgatcctacaatcgtagctaaagaatctgagaacaatgctctaccagctcttggtaatttattatctttcataatacctgcttgagtagcaacagctactaatgtaccagctgtatcaaagaaatcaataaataagaacgttaaaataacaattaagaactgtatcgttaataattgacttgggtctttaaacgcttcaaatgcagcaccgaacgttggttcaatacttggaatcttacctacaataccagatggcatttgaatcaatccagtgaacataccaacgattgctgtgatgatcataccgataaagatagaacccggcaatttaattgcatataaaataactgtaataacgataccgaatatcgccaaaagtactggtggatcagttaaatgtcccaatgttactaatgtagattcatttttaactataatacccgaactttgtaaacctacaaatgtaatgaataatcctatacctgctgaaacagccatcttcatttgataaggaattgcattaataataacttccctaaaccctgtgacggttaatatcgcaaagaatatacctgagaataaaacacctgttaaaccaacttgccaaggaatacccatggttaacacaacagtaaatgcaaagaatgcatttaatcccatacctggtgctaatgcgattggatatttagctattagtcccatgaatagcgagcctacaaatgctgctaatgcagtcgctacaaaaatggcaccttggtccattttcatatcttctgatacgcctttaacacctgctaaacttaaaacttgcgggttaactgctaaaatataggccatagataagaaagttgtgataccgcctaagatttctcttttaaagtttgttccatatttatcgaactggaaatagtttttcacgaatggatgctcctttttttaaaataccttaatagtttaatatcattcttaataaaaaacaataccaaaagcgaacttttcgtttttctgattcaactttgttcgattttatctataaattcaagttctttaatgcatctttaaacggattattgtctaaaccttcatttttattcatatactttttcatttctttacgagatactttaccagaggatttagacttcatacgctgatccatatgtgcttgcgtttcagaatgtccacaaacacaacgatataccgcttctttccctttaccaaacaacgttaatttctttttacagtttggacatcttgcatttgttttgcgctgtacattctttttcgtcttacaagatggatcttggcacacaagcatctgaccatttttagttttaactttaatcatgaatttaccacacgttgggcattctgtggttgttaaattatcgtgtttatatttacgatcactatttttaatcccatttacaacatctttcgtaaaatctttcatttcattaataaatgttttcgcctgatatttaccacgttcaattaaaagtaatttttcttcccattgtgcagttaaaagtggcgacgttaattcttctggtgctaattctaatatttgtttaccttttgacgttactttaattttaccgtctcttgattcaatggcattcatattaaataatttatcgataatgtcggcccttgttgcaactgtgccgataccacctgtttgttttaaagtttgcgcatattttttatccttcaattgaataaagttctgagggttctccatcgcttttaataacgaaccttcattaaaatattctggaggtgttgtttcatgttctctaatgtttgtttttgaaatcttcacttcatcgccttctgaaaaaggctgttgcatctctgtaatagattcaccttgtctaatagatttaaaacctaaaacagttgttacattctctttcaaaacaaatgtgtgccctgcaacctctaaagttacagttatcgcgtcatactcgtgcggaggcattaaagcttctaaaaaacgctcgacaatcatatcgtataactttaattctctattacttaagtctgacatgacaggtctcacttctgtaggaataattgcatggtgatcagatactttttgattattaaatatcgacatttttgatgaaaatgttttagacattaatgggcgtgcttggtctttatatgttgttgccatcgtcgcctgaatacgttctttcatagtatctaccatatcagttgttaaatagtttgaatctgttcttggataggttacgactttatgtctctcatataagctttgaagtgtattcaatgtttctttaggtccaattttataacgtctatacatatcttgttgtaaatctgttaaattgtacagtgattgcggatacgacttcttatgtttagtagcaacagatttaatcttaccatcgacatttttcaaattattaaccatctgttctaaagtttctttattggtatatcgctgatttgattctagctgaaaatcaaacccttttaccgttaatgataatgtaaagtattgttgtggtttgaactgattaatctcttgttgtcgtgtatttactaattgaatcgttggtgtctgaacacgtcccagggatagctgtgcatcatactttgttgttagtgcacgcgttgcattaatcccaacaatccaatctgcctcgcttctcgctaacgctgcataatacaaatcgttatattgacgaccgtcttttaaatttttaaaaccttgttgaatagcttttttagtaactgagctaatccataatcgacggattggctttttgttaccaactttatccaaaatcaatcttgcaactagttcaccttctcgtccagcatctgttgcaataataatatctttcactttattatctaaaattaacgcttttactgttttaaattgtttgcttgttttaccaataacaacagttttcatatatttaggtataattggaaggtcttctaatcgccattcctttaaatttttatcgtattgttcaggtgtcgcatttgtcactagatgacctaacgcccacgtgacaatatattggttattttcaaagtaaccattacgcttctgatttatttgtaaagcatcagcaatatctcttgcaactgatggtttttcagctaatattaaagatttcataaattatcctttctcatacgttcttttatttcgaacgtgcttcatctattccactaatctttgatttaaattcaatggtgttaaatgtattgtaacatgttaatatcactattaactttcatttcagttgaaatactatataataaaagtaacaaaaagtacggaggtaatgacatgagcatagttcagttatatgatattacacaaataaaatcgttcattgaacattcgaattatgaatcagcatcatacttatataaacttcctcaacagtacaatgaaatagatgtattaataaccgatgcgattgaatcacctggtgtattttcgattaaagaaaacgattcaatcaaagcaatcatattgtcttttgcatacgataaaaataaattcaaagtcataggcccattcgtggctgacaattatgtattatctgtcgatacgtttgaaacgctatttaaagcaatgacttcgaaccaacctgacgatgccgtctttaacttttcttttgaagaaggcattcaacaatacaaaccattaatgaaagttattcaagcaagttataacttcactgactattacatagaagcccgtacaagattagaagaagatatgcaccaaccaaatatcattccttatcacaaagggttttatcgtgctttcagcaaattacacacaactacatttaaatatcaggcacagtcaccgcaagatatcattgatagtttagacgaccatcatcatttgtttttatttgttagcgaaggtttacttaaaggttatttataccttgaaattgattcacaacagtcaatcgccgagattaaatacttcagttctcatgtagattaccgtttgaaaggtatcgctttcgagttgcttgcgtatgcattgcaatatgcttttgataattttgatattagaaaagtttattttaaaattcgtaataaaaataataaactcatcgaacgatttaatggtctaggtttccatatcaactatgagtacattaaattcaaattcgaatcacgtaacgtaaaagatcaaacaatccctgaataaaataccaagcaaataccccacagtacttcattagcatgtattgtgggtttttctactttttgtaaatattgaaaattataagtagttgttttttactattagggcagaatgctttacaataacatgcaagtgtcaattaaggggagcacttgcaaaaatagtataggagagtgagtagtcttgcaatttcttgatttcttaatcgcacttttacctgctttattctggggaagtgtcgttcttattaatgtgttcgtcggcggtggaccttacaaccaaattcgtggtacgacgctaggcgcactcattgttggattaggtttacttattactggtttcgcaaaattcaataatcctactgtaattattgtcggtcttatttctggtgcattatgggcgtttggacaagcgaatcagcttaaatctattagtttaatcggtgtatcaaatactatgccagtttctacaggtatgcaattagttggtacaacattattcagcgttatctttttaggtgaatggtcttcaatgactcaaattatctttggtttaatcgccatgatattattagttactggtgtagcacttacttcacttaaagccaaaaatgaacgtcaatcagataatcctgaatttaaaaaagcaatgggtattttaattgtatctacagttggatatgtaggtttcgttgtacttggtgacatctttggtgttggtggaactgatgcattgttcttccaatctgtcggtatggcaattggtggctttatcctatccatgaatcataaaacatcacttaaatcaacagcacttaatctattgccaggtgtgatttggggaattggtaacttgttcatgttctattctcaaccaaaagttggtgtagctacaagtttctcattatcacagttacttgttatcgtttcaacattaggtggtattttcattttaggagaaagaaaagatcgtcgtcagatgacgggtatttgggcaggtattattattatcgtgatagctgctataattctaggtaatttgaaatagaaagttaaatactcatgtaacgtaaaaatgtaatcacttctgaaaataaccattcacttatagaatgattaaaattaattttcgggaattttacgttgaatgttcctctatatgtcctaggaaatacgtggctctaaaaacaaaacgcaataacacatcatgacattaatcatgcgttttaagactttaaaattagcgatacttttaaaatcttgatgatattcatttatcaagtatgcgccatacatatgaagtggatagctgcatagggagtgggacagaaatgatattttcgcaaaatatatttcgtcgtcccaccccaacttgcattgtctgtagaaattgggaatccaatttctctttgttggggcccctccccaacttgcacattattgtaagctgacttttcgtcagcttctgtgttggggcccctgactagaattgaaaaaagcttgttacaagcgcattttcgttcagtaaactactgccaatataacttcgtagagcatagaatattgatttatgtcccggcctgttgaacaactatgtcataaataaaagcccccttttcacaatatgcatttacatgttgtggtaaagggggctctcattttctacgaatactaaaatggattttattttcaaatgtgtaaactagacaaacactgcctgatacacgtacaaaataatgatactaataatgattgtcaaattggtcgtcatacctataaatggcagtgttcgatatttaaactgaataccataagaaataattgcgacaccaaccgggaacatccaagtgaccaacaatgtcgtcttaatcatatcatctgataccggtaacaacacatgtactaacaatcccgcaactaatgctaatccataatgcaaacataaatatttaatagtagcaggtatatactttctttccagagtaaaattcaacataacacctagcaaaatcattgataacggcatatttgcatgggaaagtatgctaaagaaatcgattgccacatgtggtaaatggatgtgatttatattcaatataaacattacaatgtatgtaacgagtggcactgactgtaataatttcttacctaaatatttaaaatcgaattgatcactaccttcactaaagtagctacctacaaagtaagtaattccaaacatcacaaaggcaccacctatatcagccataccaaaataaataagccccgttttaggccatatcacttcaattagtggatatgcaaacaatccaatattcatagcaccagtcatcatacctactgatccacgcatgtgattatcatattttctaaaaaaccagacagcaatcattttcgccacaataccatatataatcattaaaattggtaaaatggagaatgacaattttaattctgcactgtttaaattcacaataactaaagatgggagtgtgacattaagaactaatgtagcaatgacttgactatctgttgcctttataaaattaatgcgcttcaaaaagtaaccaagcgcaattaataaaataatcatagtaaattgttctgtcactgttatcccttctttcaataatcttcataatttataactttaacatactccacagatattttagaagtctactgtttcatgctataatctacattaaatgcacttaattatatttcaaaggagtgttatagtatgtctttagaaaaccaactagccgaacttaaatatgattatgttcgtcttcaaggtgacttagaaaaacgggaatctttgaatttagatacttccgcacttgttcgtcaacttaaagatattgaaaatgaaattagaaacgttcgcgctcaaatgcaagattaataatctatcattcaagcaataaatgcttttcgttacataaatttgactagcattgctctgaatacgttatattgatgaattgctttatttttcgctcaattacatctagaatcacaagatgttgtcgtgttatgatttagtgtttcattaacaacatacacgcatatctatcccaacactgctatttatgttttctatgctgctgtactacatgaaccctttgaaacggagaggaagttatcatatgcaattttatctgattttactagcaatactttatctaattgttagttttattagtatttttaaaatggaagttgtatttactcgcattttgagaattattatgggtgtgttgttattgttcgtcttagcattaacgacgatgagttttccaaaagagaattggtgggtatttatcgtcttactactcttagtcggcaatgtcgaagtgacaggatttaaaatgcttaaaaaagatctaaaaggtgtaaacatcttgaatttaatgtcattatttatctttgtcatatatttcatcttaaccatcgtattattctaaataataaacaaaacatgcaataacataattgcaattttattttattatcgtacatgttgaatgccagtattgttttattaacacatcgattaaatcgcacgtgaaataaggtctaaaatttcaaattttaaaaagccataaaagtagtcaatatcatgaccgcttttatggcttttatattatctatcgtttagtgaatcgtttttttaaagtaaagagaatttcatatattactggtacaactacaagtgttaataaagttgatgaaattaaaccaccaataactgtagcagctaatcctttcgaaataagaatcgagctatcttgaccaaataacaaaggaactaatgcaccgattgttgcaatcgccgtcattaatatcggtctaattctagtaccgcctgcttcgattaatgcttctttcatctccatgccctgctgctcattattaatgacacggtctattaacacaatggcatttgttactacgattccaattaacattagcataccaattaaacttggtactgatattgtttctcctgtgattaatagtgcaataattacaccgataactgtaaatggtaaagagaataaaattgtaaatggcgctaagccacctttaaatgtaataactaggattaaatatacgataatgattgcagctaacattgcaaaggctaattgtgtcattgcattgttaatatcatctgatgcaccaccgatattaacctttacattattcggtttgtccaaattatttattttagacatcacttgtcgtgttgtgccacccacatctttatttgttactttagcagataccgtcgttgcataatcaccttgttcttgcgtcaatttacttggtgtcgttgttttaactaacgtagcgatatctcccaatttaatcgtaccaccagtcggctttttcaaagttatattattcaacttatcttctgaccagtctgtttgcttattttgtttgactttaacatcaacagttttaccattttctttaacagtcgtaactgttttttctggtaagttttcattcaagtgcattgcaagttgacttgcagaaataccattttctgccgctttattttgatcaactttaatttcatactgatcatatgtttgcgataaatcagatttgacattggctagtcctttaacctgtttcattttctgttcaatatcttttacagttgattttatggcatccattgatgggcctttcacagtaacctctacagatttattacctgcacctgttcctaaatcttgatttttccactctccaggatgtttaaagccatctacatgtttaataaccttatccgcttctacatcaaaattaggcgtgtcattatcatattcaaccatgattgccatactatttgtactacccgttggatctactggactactaccaccaactgagtattgaattgtttttacatgctttttctgttttaaatatttttcaacatctttcgcatgattcaacactgcttgctccgtttcaccaggcttcggtgtataagtaatagctaaaaatttatcgtcacctgctgaaataaagctagtgcctagtctcggtcctccaaatacaatagttgcaaccaaaattaatgtacttaatataattacaatccacttatgatttagtgaccaatgcaatacttttttataagttgtactaacaacacctaatccttcttgatgttgtttattacgacgtttaacgccttttttaaatagtgttgctgccaaagctggaacgagtgtaattgacactaataacgatgctaataaactaaatgcaatagccaatgcaaaaggtctaaacatttcgcctactgaacctgatacaaacacaagtggtaagaagacgataatagtaactagtgtcgatgacattattggtttaaatacttcagttgtcgcactgataattaaattttcaccttttagttgttcttctgaatctgttaagcgtcgataaatattttcaacaactacaatcgaatcgtctatcacacgtccaatcgctactgttaatgcacctaacgttagtatattcaatgaaacatcactcaatttcagagcaataagcgccataagaagtgataacggaatggatataatagaaattgccgtcgtacgaatgtttcttaaaaacagcaaaataactataattgccacgattgtacctaatgatgctttttcaaccatcgtataaagtgatttctcaacaggctttgcagtatccattgtttttgtgacattaaaatctttattttcatcaacgaatgtatcaattttacgttgtacatctttggctacttgaactgtattggcatcttgagctttagttatttgtagattaaccgcatcctttccattcgttttagaaatagaagtacgcacatcaccaactgtaatatcagctaaatctcctagtttcgctgtcggcataccacttatattatttggtgctgacgcttttgaattttgctgcggtgatgcctgattaacgtctgacatggctgaattttgtttattatcactttgggattgagattgcccttgccctcctgccaacgttaatggaatatttatgtttttaaaagcatcaacagattgatattgaccatcaacaacaattgatttatctttatcaccaaattggaacaatccaagtggtgttgttcttgttgctgtttttagatagttttctacatcatcagcagtcaacccatatttttcaagttcattttgcttaaatttaagggtgatttcacggttcgtctgcccatttaattgcgcattttgcacaccatctaccgtttgtaattttggtattaattgttcattcagtactttcgttacttttttcaagtcattctctttatttgaaaatgaatatgctaaaaccggaaaagcgtccatcgaattacgtcttaattctggttgaccaacttcatctttaaatttaattttatcgatttcttttttaagctgttcttctgctttatccatatctgtattattttcatattcaactgttacaattgaagcattttgtatggattgcgttttaacatttttcacatatgccaacgatcttacttgattgtcaattttactacttatttcatcttgggtactttgtggcgttgcacccggcattgttgttgtaactgaaataactggattttgtacatttggtagtaattctaatttcaatttagcactcgcgtatacaccgcccaagacaactaaaacaaccattaaaaagatagcaaacttattccccaaagaaaattgtaatagcttttttatcacagtacttccccctctttcactatattcaaaaatattttactcaaccattctatattgtgtaaaaaaatctgaacgcaaatgacagtcttatgagcgttcagatttcagtcgttaatctattttcgttttaatttacgagatattttaattttagcttttgttaaacgcggtttaacttgctcaattaattggtacaatggctgattcaatatataatcaaattcaccaatcttttcacttaagtatgttccccacacttttttaaatgcccataagccataatgttcagagtctttatctggatcattatctgtaccaccgaaatcgtaagttgttgcaccatgttcacgtgcatacttcatcatcgtatactgcatatggtgatttggtaaaaaatctctaaattcattagaagacgcaccatataagtaatatgattttgagccagcaaacattaatagtgcaccagaaagataaataccttcaggatgttccttttctaaagcttctaggtctcgttttaaatcttcatttttagcaattttattttgcgcatcattaatcatattttgcgcttttttagcttgcttttcagatgtttccatcttctgctgccatttagctatttcggcatgaagttcattcaattcttgatttactttcgctatattttcttttgggtccaactttactaaaaatagttcagcatctccatcttcatgcaacgcatcataaatattttcaaagtaactaatatcacgcgttaagaagccatcgcgttccccagtgattttcattaattcagcaaatgtttttaaaccttctctatcagatcgttctactgtcgtacctcgctttaaagccaagcgcacttttgaacgatttcggcgttcaaaactatttaataactcatcatcatttttatcaattggtgtaatcatagtcatacgtggttggatgtagtcttttgataaaccttctttaaatcctttatgtttaaaaccaagcgctttcaaattttgcaaagcatctgtacctttatcaacttcaacatcaggatcgattttaattgcatacgctttctcagctttagcaatttcttttgcactgtctaacaatgcatttaacgcttctttattactataatcaacaacaaaaccacgtgaaatataacatagcgtatacggtaatttaggtacttttttaaaaagtaattgcgcaacaccctgaacttcaccgtcacgacctacagcgattcttcgcgcgtaccatccagttaatttctttgtttctgcccatttcgttaattgtaataaatctccatttgggtgagatttaacaaatgcgtcatgttcctgattagtgatatgcatcttttccatgatttatgatatctccttctatttaacaatacctttaattatacagtttgtatcttatagtgtcgattcagagcttgtgtaagatttgaactcttatttttgaaatgtccatgctccaattaatagtttagcaagttcaaatttacccattttaattgtgaatcattttatatctatgtttcgtgttaaatttaatgttatcgtacaattaatacttttcaactagttacctatacttcaatatactttcatcatctaacacgatattcatttctaaaatgaaccaacttgacttcaatgaataaatttttcctcaagcaaccacattaatgttcatatacaattacccctgttataatgtcaataatctaacaatgaggtgtttgatatgagaacaattattttaagtctatttataattatgaacatcgttgcaatcattatgacattgagtcaacctctcaccgtgaattactttagtttacgggttatacttatctttttcacatttatattatcaatctttttcattttaattaagtcatcccgattaaataatatattaacgattctttccattgtgcttgtcattattcatatgggcattctcgctcatagcacttacgtatatttatactaatggttcaaagcgataaatagcacctctgataaaaattgaatatggtgaagttgcttgtgcgtcttttatgataaccgaatgatattttgaaactttaccatcttcaattctaaaataaatatcatcattttttaaaatcaaatctgtgtaatggtcattctcttctacaatgtccatatcaaaccatttcaaccaattcgatactgtttgtgatcggtttttacttttcacaataacagtttcaattgaaaattgtttttgaaaatatttttgcaattttttagtacgcatggaatcactttcttcccattgaataaaaaatggtggcttaatttcatcatcatcctgattcattatataaagcaattgccactttactttaccatctttatgtgtatctctttccatttgaatcggccctactacttcaacctgctcactttgtagtttatttttaactgcctctatatcatttgtacgcaaacaaatatttttaaagccttgctcatacttctcttgaacaatttgagtagcaaaagcgactccaccttctatcgtttttgccatctttttcaacttttcattattttctacatccagtagctcaatataattttcattgatataacctaatttattgaatgttccatatttatgatgatacccacctgaatgtaattttataacatctcctggaaaactaaaccgatctaactgatctatataatgaatgatgtgatcaaatttcaatatcattagtatccccctatttacatgtaattacgcttattttaacaaagtataattatttttgctcttaataattatatattgatttctaattgctcccgttttataattactattgttgtaaaaaggttagctaagctaactattttgtcttaggagatgtcactatgctatcacaagaatttttcaatagttttataacaatatatcgcccctatttaaaattagcagagccgattttggaaaaacacaatatatattatggtcaatggttaatcttacgcgatatcgctaaacatcagcccactactctcattgaaatttcacatagacgtgcaattgaaaagcctactgcaagaaaaactttaaaagctctaatagaaaatgaccttataacagtagaaaacagtttagaggataaacgacaaaagtttttaactttaacacctaaagggcatgaattatatgagattgtttgtcttgatgtacaaaagctccaacaagcagtagttgccaaaacaaacatttcgcaagatcaaatgcaagaaaccataaatgtgatgaatcaaattcatgaaatattattaaaggaggcacacaatgactaatcaaggctcattaaataaatcacctattttcaccaaaagttttacaatcaacttttttgtcaactttatcgtatacctatgcatgtatttgttacttgtagttattgctggctatagtaagcaagctttcgacgcttccgattcattagccggattagttgtaggactatttattgtcgggtctttaattggtcgatttgctacaggtaaatttgtaaatcaaatcggacctaaacgattattatttattggtttaattgctttaattatcacgcaattactttattttattgatggatctttagcttttttaatctttgtacgtctcataaacggtatcgcaactgcagttgtgacaactgcaacaggtactattgcggcatacgttacccctgttaatagaaaaagtgaaggcatcagtttattttccttaagtttagtattaggtacagcgattggcccatttctaggcatgttacttattacaaaatacgcaattgatttactgtttattatttgtgtcatattaggcatactcggactcattatctcattatttataaaagttgatttcgaagtaacaaataataaaactgaaactgatgtcattaataaaccaagatttagtattcatcaatttattgcaaaagaggccattcctgttgctgtaattatgcttttaattggcgttacctatgcgtcaatcctaacttatttacaagcatttgctttagagcgacacctagtcactgcagcaagctatttctttatttgctatgctatagcatcgttaattactagacctattgctggtagattgatggatgataaaaatgaaaatattattgtctatccagcatttatcatgcttttcctttcatttgtgtgcttaatttcaagctatcaaagctggttaatattacttgctggtgcttgcctaggtttagggtatggaaatttatcatctgcaatgcaatctattgcgataaaagtctcacccccgattaaatatggtatcgcgacatctactttttacgttggtctagatgcaggtgtcggcttcggtccatcattccttgggttatttactcatatgttttcatatagtgaaatcttcggctttatggccgctttagcaatcattactatgcttgtttacttcttaattcatggacgtcatgtaactagaaatgccatgaactaaatatttatattcaaaaataaaaagcatgccaatctctattcatcatttgtctgtccccaagacgcaaatatgatgtactgattggcatgctttttaagtttttagtttgtaacgcttaacacttctatttctttagtaattttatctaacaatttcttttgagaagtactatagaaatagaatacttgtctttcatccgtttcagaacgcaatttagaaataagctcttttttatagattttacggataatcacatcgattttacttgtatcccatagcatttcaaaatgtaatgtatccctcaattctttaccgctaatcttttcagcttcatacactttaaaaagtactacaaattcttcaattgaaatcttatgtgttgtttttaaccagtgctttaactgacttaactccctttctgcttctataaaacgttgaactttattactcataatatgatgcctcctatgtttcttcttagatgtttgtaattcatattattatacaattacttaaatttattatatatcaaacttagcattttatctattacaaatattaaattgctggctatatcttgtttagatttatatcttttggacaacttgttgtttattcgacaacatttatacctaaaaaagatatattacaactcaatgacttggagtgtgacatcaatgttaaagagcccttaaagattaattatgtagtgatttttgggagtgggacagaaataacattttcacaaaatttatttcgttgatccccaacttgcattgtctgtagaatttctttttgaaattctctatgttggggccccgccaacttgcacattattgtaagctgactttctgtcagcttctgtgttggggccccgccaacttgtaaaaactttaaaaacgatcatttctattaaatctggcatagatatgaccgtttttactttaataaataatattgtattttagggagtaagacagaaatattaaaacatctctaatgatttaatatgtagtggtccctacacattaaccaccaatataattcatgtttatctttttacgttgacgattggcaactgtttgagcagttctctcatctgaatatcgatcatctcttatttgccataaagctttaaattgttcttttaattcttcgtcggtcacgccagaacgaataaacgctttaacgttaaatccatcgacagttgcaaataaacatccgtaaaacttcccatctgatgacagccttgcgcgtgtacatgtagaacaaaatgattgtgaaacacttgtaatcaaaccaaattgaacaccattatccttatggcgataatattttgctacttccccaaaatattttggttctacaggatcgatttcaaagtgctgctctatcattgtaagcatttcatctttagttacaactttactgaaatcccatccattatcattaccaacatccataaattctataaatcgaatctctatatgtttatctttaaaatattcaagcattggtatgatttgatcatcgttaatacctttttgtataacaacatttacttttacattcaaaccaatagacgtcgcgtaatcaatttgttctaaaatcgtagtcgctttaatattacgattattgattgattgaaatagcgtatcatcaatagcatccaaactgacattaattctgcgtagcccagcatcatataacttttgtccatgcttttttaataacaaaccatttgtagtcaaaccaatatcttcaataccatcgatttgatttaatttagctataagtacatctaaatcgcgtcgcatcaatggttctccacctgtaatgcgtattttttttacacctaattctgcatataccttagcgattctagccatttcatcaaacgttaacagttcatttttaggtaaaaatacgaaatcatctccaaatacctctttaggcatgcaataatcacacctaaagttacaccgatctgtcacagataaccgtaagtcacggatgggacgtcctagtttatcttttatttgttctaccatttgtggacctcctaacagcttacaatttttgaattaaagcgtccaaatcatgctgataatttatatttttgtaccaatatgagggcgcatctacatccctgacatccaaataatccgttgataattcatgatatatatttttaaaactgtaattatcagaatgtagtgctttagttatagcgcctaatgcattcggactataaaatgcaattgttggaataaaacgtccatcttctttaaaagctgcgacatctaaatgattttcaataagatgagaaactaaaaactgatacaacgtgcttacagctttaccagtaatcattggtgtatcaacagaaacgacaaaaaacaattcttcttcaggatgttgcttcatgattgtataaattcctgctaatggacctttatcattatgattctcatcatctataacaacatttggatatttaaattgcgttgccaattgcgcatttgtactaataataatttcattgaacatatttgttgattctaatgtcttaattactctactataaaaggtctcaccgttcacttccgcaaaagctttgggcttaccaaatcgcactgaatgaccacctgcaagaattattgctttcatgctcccttaacctccactaaccggtggaattaatgcaacagtatcattaggttgaatgaaatctgatttttgtacaaattcctcatttacagcaacttgaaactttttattattgatttgcggataacgttcaaacaataaatcttcaaattgttgtacagtcaatgcttgttcaagcacaatatcttcctgtgctttttgtaatatatctttaatttctgcgaagtaaagtaccttcatctctcttattcctccctcttcgcttcttcataattccctttttgatgcccttgccattttgaaccatcttcccaaatttcttttttccaaatcggaacaatttcttttatacgctcaattgcatattcatttgctcgataggcatctttacgatgcggtgaagaaactgcaattaatacagcgatatctgaaatttgtaatggccctattctatgaacaatactcgttatcgttccaggccatttttcatttatttcatctccaatttgtgccaatttcttttcagccattggaatatacgcttcatattctaaatattccgttttgacgcctttagtccattcgcgaacatgaccggtaaaaacaactactgcaccttgatattcatttatagtgaattcacgatattgttctgtttgtatcggttctatcacgatttcaaattgtttcattcatttcaatcctctatgttaattgtgtatcacaatcatttttaattttatttaataaccattgctcaaatgctgtaaaatcttcatgctcccttacattaatgctataacaaacattcgacaattgttgtaatacttgcaactcttcttcatctcgatagactacgactttttcaaaatcagcatttttaaagccttcaactaatacgatattggtgtcaattgtaacagatttctcaataatttgagtaagattttgattatctacacgtgttacagtttgctgatattgaaaaccttgtacaatactttgatctgcccccgcttcaaaatgcttcatgtgatcgacgtctgaatcctgtaattgaatatcttccttagcatgcccatgatgtttaatagtagcaactgtataaccatgtgtctttaagaaagagacaatatgcctcatcaatgttgtcttaccagactttttgtaacctacaatttgtaaaatcataaaagaagttcctcttcagcagcgtcagattcagtcaatataatatctactgtatgccccgctttaaaaccacgtgaccctcctggtaacatgaccatacagttagcatgtgcaatcgctacaaccgcacctgatttattgaatcctgaaggtactacagtagctccagcacttgttaacgttgctttagcacgtataaatcgtgtgaatgggtttgccttggtaaaatcttccattaatgttgctttaattatttgcgggaagacttctagtgcgccacacatatgtttaacagctggtttcacaaatagttcaaatcctgtaaaacaagctgatggatttccagataatccaaacaaatactttccatctgcaaatgcaaccgttgttacgctaccaggacgcattgctactttattaaataacacttccgcctttacagccttataaatctcaggtaaatagtcaaagtctccaacagaaactccacccgttgtaataacgatatcgtgtttttccatagcttctttaacgacttggatgccactatctaaatcatctttttgtgttttgtaaataccaacttcaagacctaatttttctgctaaggcacgaatcattgggccattagagttacgaatttttccatcttctaatacatcattaacatctaataattcgcttcctgttgcaataacagcgacactcggttgcttaataactttaacctctgcatagccatatgttgcaaggaccgcgatagcccctgggttaattacttgtcctttttttagaacaacatcgcctgtctttgtttcttcaccttttaaagatatattttcattttttgaaaatggtttacgaattgtaaatgtatcttctagttcaatcgtttgttcaaacataacaacagcatctgcgccatttggtatttgtgctccagtcataatacgcaccgcttcgtgatccccaactaatttatcagaaactgaacctgcaccaatatgatcaatcactttaaactcaatgcgattctgaccacttgccccttgtgaatcaacactgcgaattgcaaaaccatcataaggtgatttatcaaaccttggtatatcataagtagctacaatatcttctgctaagatatgatttagacttttttcaagtgctaccgtaattgccggcattgaactctgctgattaacgatacgttgaattgcttctttaactgggattgggtttcttttttctactaccattaaaaatcatctccaaaacttttattttttcatgatatactagatgcactaggaggggtaaaatgactgagtttactcatattaatcaacaaggccacgccaaaatggtcgatgtatcagacaaacaaattacaaaaagaactgctgtcgctcattcaagcattactgtgaatgaaactatttttaagcagatttctaataacaccaataccaaaggcaatgtattgaacactgctcaaatcgctggtattatggctgccaaaaatacatcaacaattattccgatgtgccatccattaccattgactggcatagatgttcacttcagctgggatgaaacaaatgcacccctttatactttaaacattcaaacaactgtctctacaactggcaaaaccggtgttgaaatggaagctttaaccgctgcatcagcaacggctttaaccatttacgacatgacgaaagcagttgataaaggtatgattattggcgaaacctaccttgaaagcaagtctggcggtaaatctggagattttcaacgccaatcaggtcaataaattattttgtaagctcatgaatcagatgatttaattctggtttaatgagcttttctaatgctaatttaactgcgcctgttgatcctggaatcgaaaatatcaatttattattaactgtacctgctacagcacgagacaataatgcacgcgtgccaacatcttcaacataactcaaatatctaaacaattccccaaagccttctatctctttagttaaaagtggttttactgcttcaatcgtcacatcacgttgtgcaatacctgttccaccagtcgtaatgatgacatcaatatcttcttctaaccacttcttcacctgcgtcgtgatggctactttttcatctttcacaattgtataatgtgcgtcactcacttcaacgtcatctgcttgtaatagttggcgcacgcattgaccacctttatctgtaacaaagtctctagtatctgataccgttagtacggctgctttaactgtacgattcaatttaacgttttgatgttcgcccataatattacactccttttgtcttatctttttttatccaaacaataaattcattagatgtgtggcatctgatgtgcgtgtcatgccatgtattaaaaaccttccacctttaaaagcaacaatgcggtgtcctttaaattcaaacataaccatatacgaattactgcgataatttagttgatgttgttttaaaaattgaacaagaatgtcgtgtgtaattgatgcattttcatactgtacagtgtctctaccacacaatgttgcataacgttgttcattcttgtttaaatacggataacttggtacatctccacaagttgtacagtctgaacgttgcattttactgaaaccaaatgaataatgactaccttcccaaatatcgccataagttatttttgtgtcaattggttgttccgttaatactttcatcgcatctcttaattgtaaacttgttgccatcgtcacggcaggttgaatgacccctactgtatcacatgttaaatttaatgctggcaattgtggtaccaaacagttaaagcaaggtgttttaccaggtataaatgcagcttctgtatatgtactctgtacaacaccaccataaatccaaggtatacgatgtttatatgcaaaatcattaatcagttgtcgtgtttcaaagttatcggttgcatcaataataacgtcaacgtcctgtccatgtgtttccaaaaaataataatccacatgggcaatacaaccatcaatatcaacatcactacgtaacgctagcaaatgctttttagctgcaaccactttaggcatcattttcaaagcatcttcttcagtaaacaatgtttgtctttgtaaattactaaattcaatataatctctatcaacaatgattagtttagcaatgcctgctctaacaagtccttcggccacatgtgtacctaatgcgcccataccaataatcaacgcacatttttgatttattttgctttgacctatttcacctatttgtttaaataaaatttgccttgaataacgttcttgactcacattaagttatcctttctttttatcattactttcattatatgacgcgcgtcaatgtctctcaaaaaaactgcccctaaaaaagagtttaaaacatcattaaaatgctgatagaagcattcacttctacaattttaaatacgttctaaactctttaatggcaaataaatgattacccaattgtaataatttcatgagccatttgttctgcttcatagtttgaatgtgtcacaaatatgattggtatttgccattcgttgaaaatacgtttaactaatgtaatactctcatcttttgtagtatcatccaaactagaaaaaggttcatctaataaaattaaatctggtttcgtgctaagtgcacgtgcaagtgctacacgttgtgcctctccacctgacaatgtcataggatattgtttcatcaaatgattaatgtttaaagtttgaattaattgatcgatgtgtttagatggttcagccataaaagtaatatttttataaaccgtcatattaggaaacaattggtagtcttgaaacagatatccaatacgtcgttgttgaattttaacattcacgttttttgtcgtatcagtaagcaattgcccattcacttcgataatagcttcatctgctttacgtaatccggcaatcatatttaaaacagtagttttaccaatgccagatggaccacgaactgcataaatttttggttcagtatcatctatattgatgcgaattaaagtgttctttaattgatatttcacattgattttaagcatctagtcgacctccttatatttatctttattcaataaattaattgtagatataaccacaatagagaatgcgactagcactaatacccataaccacgcttcattttctctaccttgttccactaagaagtatatttctaaaggtagtgtattcgttttatttggaatatatcctgcaaccattaatgtagcaccaaactcacctaatgcacgagcaaaactcatcattatacctgctaaaatagagcgtttagctaatggtaaaattaatttgaggaaaattttcgtttcacttgctcccatcgttctagctgtattaatcattttcgtgtctatacctctgaagccttgcacagtatgttgatacattagtggaaaactaacaatgacagatgctatcacagcacctgtcaaagtgaacactacaggtaaatgtagtacattcgcaaagaattgaccgattggtcctcttggcgagaagatgattaatagaataaaacctaataccgttggcggcaaaacaataggtaatatcaataaactttccaatactttaacccacgaacccttacgacgatacaaccatttagatataaaaatacctaaaaccgttacaataatcgtactgattacagcaactcgtattgatatccaaaaaggtgttaagtcaggcatggattacaactccttatgctgcaaagtggtattcttttaatatttctttagctttatctgattttaagaattccatccactcttttgctaatttactatctgatgtagcaccagcttcgtatgtgattggtttcttaagttctacttctttaattacttttacagtatcaatttttttgttttgtttatataagtcagttttatacacaaaaccttgtttcgcattacccttttcaacataatttaatacttgttttacatctttagcataaacgattttactttcgacttctttaaataagttattgttatctaaatactgtttcgcatattttcctgctggtacagttttcacttcacctaatgctaatttatcattgtcttttaagtcttttactgaagtgtaatttgaatctttatcaccaattaatactagactatttttcgcatatttatatgtatcatgcgctttattcttgtcttttaatgcatctacatctttagtatttgcagacataaatacgtcaacaggtgcgcctgattcaatttgttttcttaatgcccctgatccaccatagttaaatttaatatcagcatttttatgctcttttttaaattctgaagctaatttcttggttacatctgttaaacttgctgccgctgcaacttgaatctcttgtttcttaccattgtctgcgtcatcttttttactttcattattatcgttagaattagagcaaccagctaatactaaaaataatgccattacaatagctataaaacgtttcattttcattgagtgaacccccatttttaataatatttacattttcattatacacttactattatatttgaaaagaaccgttgcctgtttatatattgattcaaacaattgtcaaatttgcataagattgatatttattaattgatcccctagtatgtatactctcgaattcaatttaaatcaaacagattgctcgctattaattttataaatcaaatttcaaacttaagcaaatatgttaaaattttaagcaaattgctttaaaataaagtttaagctaattaaaggggttagataatgaacaaagatgtatctttaggtcaaccaattgttagatatgaagatggaaaattattcaatacaacagatcaatatgtgacagaatttccacttacaattatggtgaatggtgaagaatttgcgactgttatatgcagtccaacaaaccttgaggagttagtcattggatttctggcttcggaaggtgccattttaaagcgagatgaattaaaatctgtgctgattgatgatagtaaaggttttgcccatgttgaacttaataaagatttaggcgatcgctttcaatattccacaaaacgaatgattgcatcttgttgtggaaagagtcgtgagttttattttcaaaatgatgctgctatcgctaaaacttctatgtctaaaatcactttaactccaatacaaattattaacatgatgactcgattacaaagtgcaagtcatatttaccaagaaacaggtggcttacataatgctgctataagcgatggtttgacattttttgtacatcgacaagacattggtagacataacgctctagataaattatatggattttgtatccagcgacatattactgtccgagataaagtattaatttttagtggacgtatttcatcagaaattttaattaaagccgcgaaaatcggtgttggcgtcattttatctaaatcagctccgacaacgcttgctgtaaccttagctaatgacctaaatattacggcagtaggttttattcgaaatggtggctttaatatatatagtcatccagaacgtatcatcgactctgaacaataacatattcattatagtgtgtcataatgaacgatattctacatgaatcaacaatttaaacgcactatttttataagtataagtagctcaaaacaatttaaaaagcagtaagttgatttctactcgaaaccagcttactgcttttttattctaatacaaacctatcatcaatcgttaatttccaatatcttcttttaatatttgataacaaaacgattgatagacataaccttgctttgcatacatatcttttgctgtatcttcaccatctgtaactaatatgattggtttgtgattttttgatatggcgtattcacctatcaacgattgaattgtagatccaattccttggtgtcgaaattgttctaatacaccaaatccatctaattcaatgtaattttcactttcaatgacatctacaacgccaataggttcattatttaaataagctactaagcgtttaatcacatctttttgataatgttcccttaccatttcttcatgtgcatctgcatagtcttttccaaatggcagactaaactgatatgcaacttttaaataggcatctatatgcgactcgtcaacgacggcaatttcaacgtcagagttacgcggcaaattagcaagcgcatcactttctatggcatacaattccataatacctagttcaaaattcatatctttaaacatagccatccaatgattatcaagttgttcattttccgggaaactaaacgcataatgatttgaaccttgatttgtatgtaattgatgttgacgttctaagtctttcagccatcgctcttgggtaggcgtctttttatatatccatgtgttgcttgtgtatcgttgtggaaaagaaggcgttaaataaattaactgctcgtcgtcattttcaaatatagtgccgttacaatatatatctgacatacttatactagccattgacacctactcctttcacttttataaatttcaaagcaacttattcaattactttattatcttaacttaaatatgattattttaatcccataatttgacgaaactgcgagtgattaagtaaagctgtaccaatcaaacttgctacaattgcttttaatatatcaccaggcaaataagctaatgaaattgaaatagctttcgtaaatggtatgttaataatcatgcccataatcaatgtaccaataacatctaatgctataacaccaaaaactaaaataccaacgaataaaatccagaaattaatttcattgatgaatctatcacgaatcgcaccaatcatgaatgctacaactggatataatagtaaaaaccctgctgaaggacctgcgaatacaccgatgccaccgcgaccacctgataacaatggcaagccagcaactactaataataaaaagacgataacacttaatgtgccatatttacgtcctaaaatcacacctgctaagaaaataccaatgttttgaagtacaattggtactgaagaaaatggtagtggaattaccggtaccattcctaaaatagcgataatcgctgtcattaaagctgtatatactaactgttttgttgtcattttttacttcctttcgtatttcatgaccattattatagcaccattgtaaactttaagaaatgaaaagtttacaataagttgttctatataaattaaaaccttaattattctacacagctgttaatttacttttttagcaagtgcagttatataatcaaaaaatgcgttgttatctacatgatttatgacattaattttgcgcccatctttacactcaaatgtcttaccttgacttggtccataacttattacatcgacttttttctcaattgaatgaaccaagtccttgttaccaatataagcagtcgttaaaacatcccataaaaagtaagtagaatttgttataaagtgtgttaatggtggtaccgctgcataacttactcctaaaaaatcaatgcccgtatattggcgttcattcgcccatctttgtctaacatctaacgttagcggcacttgattcgtactttctaaagcaaccatatcaatctctatatcgctatcaaaaacaattttaaccgcttctggatcccaatatgcattccattctgcagaaccatcatgctcaggttcttcaacatttccttttggtaaaaaggtgccacccatccaaactaatttttctatatactgaacgatagatgaatctttttgtagtgcttttgctaaatctgtaagcgggcctgtaaataataatgttactttttctgattgtctctttaaagtttgaataatgtcttcaaaggcttctttgtcgctcacatttgaagcaacatgtttgactggctcatttaaaattggcaatgcgtccataaaaaaggcatgcatacgccattctttaggaaatggattttttcctcgttcatatgatggcgcaacttgaatatcttcatttgaaaaacgattaataatttttactgatgcgctcaaagatggctctaaataacaatcagcaccaattgtactgacccctatcaattgaacgttttccatttgtaataataaaaatagagatactaaatcatctacaccaccatcatggttaaaataaactttcttagtcactcgaaatcccccttacatttcattgtccattaacaatattatgtttttataaaacgttgttatatatctttctacaaaatcataacattctgttgtaatccttttaaacctcttcttttattgatagccattccctgatatcccttccataaagtatgcactaatataattatgatataacttatcaataaagagatacattgagctattttctcaggtatactactttagctataataatactaatctatcattaattaaattgaacgataacaacggcacttattatttaaaaaaatacaaatatctaactttctagctataaaaataagagcctaatacaatatcaaaagatgatatgtttcagactctcatttcactaacttatatagctgaattattttgcagctttaattaatttttcttttaaatctttacgcatgaaatctaatgtataaggatcgttgtaccagtatgtaccagcatcaactttaacaatatgtccttctttagtagctttcaaattcttccacatgtttgttgattcatatcctggtgtaggtttaccttcacttgtactcacaatgtaatcaccagcatatttttcaatttcttcttgtttcacttcagcccaacctgcttttgcagttaacttttgttgttctggttgcattttcaaaccaaatgcttgatataatacttctccaccacgaccccagttatcgccgtaagtgtataattttttatcaaattcatcaaacaatgacactgttgcatcttgtccaattgcttttttaatttctttaccgtctttagcagttgtttcttcccaatctttcttccaggcttttactttatcttctttaccaacaattttccctaacatttcttgttgttctaaatatttatgcttattatagtcaacaactactgttggtgctactttttgatattttttaatatctttgtcagtagagtatacaataattaaatctggcttttctttagcaactttttctacatcgccatcaccaatttttgtaacacctttaaatttatcttttaatactttgctttgatcgacttgttgatttacagctacaatgtttgcacctaattttttaagtccaccagcatatgttggcgcaactactgcaatgcgtttagggtctttcggaatatctaccgttttgccatcgtccattttataagatttagtttcagctttgttatttttttcaccttggttcccacacgcagctaacactaataacataattattaatggtaataatagttttttcataatttcctcctattgaaaatgattatcaattattccaaaattatacaagattgcatatacatttacaatagctagtgctatttatttttttattttcgcaaaaaatttagcaaaatatcttaacatccctataaatccccacaaaaaagggtaaatccgaacgtcaaatttcatctctttatgccaatcaacgatcgatttacctttttaaatttaaaatgtatctgtaatactcttagcaatatttgtatatgctgcatcttccataggtggattgtgtaatcctgcacgcatgtcacgatagtaacgttgtaatggtcgattcatttctaagcttttagcaccaactattctcatcgctaaatcaatcacttcaagcccttgattcattaccatcactttactcgcacttgttggatttcttatctgactgtcatctttatattgttgatacccttttgctgtactccataaaaattgtctcgcacataacaatagcgtttccattttccctaaattttgttgcacagttggcaatgttgcaatcgttccttcaatactattagggctatgttggattgcaaagtctacagcataatttctagcagcttgtgctatacctaaataacagcttggtatatgcaatatccaaccatttggcgctttacttttctctgtttccactaaatgttttaatggtacttttacatcatttaatattaaatcatgactttctgtcgctcgcatacctaatacgtcccaattatcggcaatttcaacaccaggcaaattcctgtctactaagaaaaaaccaacactttctaattcttctatataagcagcaacaataatatgtgttagtgctttactcattgatgtatatgtcttcacaccatttaaaatatacccatcatcagctttaacagcatgtgtacttggtcttccccctcttgttggactacccatttcagcttcactaactgctctattaactaatgcaccattattaatttcaacagcaaattgctccaacatatcttgagaccataatttctgttcataaatttgtcctacgacactcacatgccaaccaatagataatgctgtggcaccatcaagttcgcctaaaaatgattgcaaaataaccatgtcttctatggtcgcaccttcaccaccatatgcttttggtaacgttaattttccataaccttctttaattaaccattcaatatttttatatggaaattggctatgttgatcattatattcagctttagccttaaatgtatctctaattactttgaatttttcaatccattttctttgaatttccgttgttattaaaaaggaattatccatatcattcatattagtcaccccacacaacacacaatataaattatttattcctagtttaacactcgactttaaaaataaaaaggaacgtgctgtgaacaattaaaagaaaactgataattcgattaagtatgcacttaattttatccataaaaatacaccttaaactatacaattcgctgtatggtttaaggtgatattcaaacaatattaggtttgatttaactatcaagcatctactttgtcatgtttaataccagcaaataataaaatccatgtcacgataataaatggcaatgttaatgcaggtaagccaaacggttcaagcaatgttgttgtacctagttgcaccactactgttaataacacacctaaaaaagtcgaaatataagggttaatcgctgttttaaatgtatatcctagtgcgattgccattaatacaaagttataaccgaataatccctgattaatatcatcataattaccacctaatagagctacaatgataaagcttaacaaactagctataacagctaagagtgctgcttttcttgatgctatcaatatgccgattaaaatacatacgccaccaattacactcgcttcgataaatacttgactgaatccttcaaataatgactgaatgaaatgtattctatcattgttgctaaaattaaccgtttcaatgttttgaggcattaactttaacgatgtatctacaaatttaacctgtcctgaaagtaaaattgtaaaccaagtcacaatgacaaaaggcatcgtcagcatcggaactttatatggtcttaaaacttctctcactgcagcagcaactggtaacgttaataaagttgctatcattgttataacaatatctaatcctgacttatctaaaaagattgttaacgcaatggcagttaacactggattaaatccggctaacccatcattaacctctgcctcactataatttataaaacgcgcaaaagtataggcgatgatgctacctacaatagccgctaatccaattgtccaatcggctacaaataatcctattaagataaataatcctgtccatttattactaattaacacaacctgagatatatttttcaaaagcacatctattatcttcaaatctttcacctttcctttgaatcattactcattaatatactactattctatgaaaagttatattaaaaactattttggtttttacataaatatattccgctatttgttttcgattagattgtttgcttcaatagcggatatgctaaaaatataattttctaattacacattgaactttgtatattacttgtttatcacaacaattaggattaatataaattttgtaaattgtatctaatatgaaattgggggttttaatttgcattttacacaacgagagcaagacaaattaatgattgtagtggcggcggaagttgcacgtcgtcgtaaagcacgtggtttgaaactaaatcatcctgaggcattagctttaatcagcgatgaattattagaaggtgcacgcgatggtaagaccgttgcagagttaatgagttatggtagacaaattctaaacaaagaagatgtcatggatggtgtcgaacacatgattacagatatcgaaatcgaggctacgttccccgatggtactaagttaatcacagtacatcaccctattgtttaaaggaggcagtcaaatgataccaggagaaattattacaaaaagtacagaggttgaaattaataaccatcatcctgaaacagttatcgaagttgaaaatacaggagatcgaccaattcaagtgggctcacattttcatttttatgaagcaaatgcagcattagatttcgaacgtgaaatggcatatggaaaacatttagatattccagctggagcagctgttcgatttgaacctggggataaaaaagaagttcaattagttgaatatgctggcaaacgtaaaatttttggttttcgtggtatggtcaatggtcctatcgatgagtcacgtgtctatcgcccaactgatgaaaatgatgcatatgcaggtgtattcggagataacggtgctgaaaacgtgaataaaaaaggaggaaaaagatcatgagctttaaaatgacgcaaaatcaatatacgagcttatacggtccaactgttggagattctattcgtttaggtgatacgaatctatttgctcaaatagaaaaagactatgcggtttatggtgaagaagctacttttggtggtggtaaatctattagagacggtatggcgcaaaatcctcgtgtaacacgtgatgacgtgaacgttgcagaccttgtcatttctaatgccgttattatcgattacgataaagtggttaaagctgatataggcattaaaaatggttatattttcgccataggtaatgccggcaacccagatataatggataatgtcgacattattataggttcaacaacagatatcattgccgctgaaggtaaaatcgtcactgctggtggtattgatactcatgttcattttattaatcctgaacaagcagaggtcgcattagaaagtggtattacgactcatattggtggtggtactggtgcttcagaaggttctaaagcaacaactgtaactccaggtccatggcatattcatagaatgttagaagctgccgaaggtttaccgattaatgtcggttttacaggtaaaggacaagcaacaaatccaactgcactcattgaacaaatcaatgccggagcaattggattaaaagtacatgaagactggggtgcaacaccatctgctttgagtcatgcattagatgttgctgatgaatttgatgttcaaattgcattacatgcagatactttaaatgaagcaggatttatggaagacacaatggctgctgttaaagaccgtgtacttcatatgtaccatactgaaggtgctggtggcggtcatgcgcctgatttaattaaatccgctgcattttcaaatattttaccttcatctacaaatccaactttgccttatacacataatactgtagatgaacatttagatatggtaatgattactcaccatttaaatgcggctattcctgaagatatcgcattcgcagattcacgtattcgtaaagaaacgattgcagcagaagatgttctgcaagatatgggtgtattcagtatgattagttccgattcacaagcaatgggccgtgtaggtgaagtaattacacgaacatggcaagtagcacatcgcatgaaagaacaacgtggtcctttagatggtgattttgaacataatgataataatcgcatcaaacgttatatcgctaaatatacaattaacccagcaattacacatggtatttctgaatatgtaggatctatcgagccgggcaaactagctgacattgtcttatgggacccaattttctttggggttaaacctgaattagttgtaaagggcggattaattaactctgccgtaaatggcgatgcaaatggttctatacctacatctgaaccgatgaagtaccgtaaaatgtatggtcaatacggcggaaaccttacaagtacgtcaatgacattcgtgtctaaaactgcttatgaaaatggtatcaatcgtgcattaaatttaaaacgcatggtgcgtccagttaaaaatattagacaattatctaaagcagatatgaaaaataacagtgcaacacctaaattagacgttgatccacaaacatatgaagtatatgtagatggagaaaacattacaagtaatgcagcaactgagttaccattaactcaaagatacttcttattctaggaggaacatagaatgattgttgaagaaatccaaggcaatattgccaatttgtcaaattcagaaaaacaaaagcacgtcgaaaaagtataccttgaaaattcagatcttgttaaacgtattcaaagagtcgttacagaccatggcactgaaataggcattcgtttaaaacaacctattgacttacaatatggagatattttatacgcagatgaccataatatgattattgtggatgttaattcagaagatcttttagtgattcaaccaagaacattgcaagaaatgggagatatagcccatcaattaggaaatcgtcatttgccagcacaatttacagagactgaaatgctagtacaatatgattatttagttgaagatttattaaaaagtttaggcatcccatatgttcgagaagaccgtaaagttaataaggctttcagacatatagggcattctcatgattgatcatacacacttaagattatttcagttctgtgattcacagtttccaacaggtgctttcagtcattcatttggtcttgaaacatatattcaacgaaatataattcatgacgatcatacttttattgcttggttaaaaatgtttttacaagagcaacttacctattctgatggtttagccatgcgtttagtttatgatgcattggaaaatgatgatacacaaaaagtattacacatagataaactgatgtttgttcaaaacttacctaaagaaacacgtgttggtgcaaaacaaatggggactcgcatggttaaattggctttagaactttataatagcccatggattgcttggtatcatcaacaaatgcaagataagaaagcaaagttaaatccagctatttgttttactatgctaggccatcatttaggtgtagatattgaaacgattattgattactatttatatcaaaatgtttcaagtttaactcaaaatgctgttcgtgctattccacttggacaaactgctggtcaaaagatagttactcacatgattccttatatagaagaaacaagaaagcagattttcgaattaaaagaagcagattttggcatgacagcgcctggtttagaactaaatcaaatggcgcatgagaacgtcaatgttagaattttcatatcataggaggttataattgtggcaaatccgattaaaattggtattggtggtcctgtaggtgcaggtaaaacacaattaattgaaaaagttgtaaaacgtctttcaaaagaaatgagtatcggcgttattacaaatgatatatatacaaaagaagacgaaaagatattagtaaattcaggagttctacctgaaagtcgtatcattggtgttgaaactggtggatgtcctcatactgcgattcgtgaagatgcatctatgaactttgcagcaatagacgaattattagaacgtcatgacgatatagaactaattttcatagaatctggtggcgataacttagcagcaacatttagcccagaacttgttgacttttcaatatatattatcgatgttgctcaaggtgaaaagattccacgtaaaggtggtcaaggtatgattaagtcagatttctttgtaattaacaaaactgatttagctccctatgtaggtgcatcattagaacaaatggctgaagatactaaagtatttcgtggtaaacgtccatttacttttactaacttaaaaaccgacgaaggtttggatgaagttatcgattggattgaacgcgacactttactcaaaggattatcataatggatgaacaacaatggactgggcaacttgatttaacagtgtttttcgatggcaatcgatcagtatcaagagatattttctttgaaaaagcacttaaagtgatacgtccagtttatctaaatcaatctaccattcctacattttatatagtaaatgtaggtggtggctatttagatggagatcgttaccgtatgaatgtgaatgtcgaagataacgctaaagtgacattgacatctcaaggtgcaacaaaaatatacaagacaccttccaatcatgttgagcagtatcaaacttttaatttaaaagataacgcatatttagaatatgtcgctgatccaatcatcgcatatgaaaatgctaaattttatcaacacaatacgttcaatctcaataattctagttcattattttatactgatattttaactcctggttattcaaaaactggcgaagccttcaagtatcaatatatgcatttaataaatgaaatttatattgaagatgagttagtcacatatgataatttattattgaatcctaataaacaatcgatcaatgaaataggttatatggaacattactctcattatggctctgcttacttcatacatgaagatgttaaccaaaaactaatcgattcagtttatgaaaccattagttcttatagcaatacattcgattgtcgtgttgctatttctcaattgcctacacatggctttgcagttagaatttttgcttatcgcacacaaattatagagaaaatacttggaaccatccaaagctatatcgcagaaaatatttatgatcgtaaacttgattttctaagaaaatattaaaataaaaagactagtgtaccttgtttcaagcttaataagctgaaataaggtatggctagtctttaactttaattaaagcatcttcaatatttaaattttaagttaattttatgtcccaatgctgaataaataacttcgttttaataaattgttatcgttcaatgttattaaacgcaattaaccttgatttaatttttaatgtattcttctaattctgaaatcagtttttgaatatttgctttttgtgtatctgtaacataaacaataactgttctttcgtcttgtaaacttcttttctttgataacaattttaaatcttttagcttttgtaaagctttagttaaatagtaaggtttgaactctgagcacttagcaatctctttagatgagatttcgttagactcacttcttaaaatatgatttaaaatataaatttcttcatagttcaaattgaacttcttttttgtatctctgaaaaacttcttaacttgaaatgttgcgttgactaaatcattaatgtcattaattttactcattattaaaccactcctctgatgcacatcttgttgtagcaaggttcacatgtaatttattaaatcgaaactctatccaactatgttataaagttcattctaaacaaataagtataaaaattcaatatttttattactagaatatggttaaatacatttatttcttataataatttgatgtttaagatattttgccaaatcgaaaattattagtctgaatattttgtatcttaactgatatgtaaacttttaaaattttaatctatatcaacgtgtttgatttgatattttttatattaattggatggcttgctcacaaaatttataaaatataaaaaaagaagagctttaaatcataacgcatgccatttatctttaaatgcaatgagttatcattcaaactcttcttatcaacctacatacattgacattatactatcatatgttgttttacatattcaacaaacatttcaacgttatcacttttaatatcatgcattgggacattaccaatattaaatttgaacattatagtttgaccatcataatctatcttctctatttcattataactaatacttctataataaaattggccattcatatctacattcataattaatctttcatttgttgctataaatgccccttcaaattcattctcaccttgaacttgatactcaattattcctagcactgacggaccctttttttcagttggaaataaatcattcggattcacattatctaaaatcataatatccctcccacttaaaactataaactattcttcataggtatatgaaatacaagtgattaactatttattattaagcttaacttgtattcccttttcaagataattataacatgcttgaataagcatagtgactttagaaaacttttctcgcttgattgttacaataacacgtctttcatctaattcacatctctcttttttaactaatcccttcaaaattaaacactttaaaatcgggctaaccgcaaatatcgggtgatggaattcaccctgtaattctttaaccgtcaattgacctttatgcagatttaatattcctaaaacgtataactcttctaatgttaattgacacatatttaaataacactttagatttcgaaataattcttgtgacgacaataaatacgatacatagtcacaactaaaatcaaatgtatattgaccaaaataacgttcaatatagtcactaagctcattattcatatattctattttatctatatgcattttattaatcgaaatagtcaattgaagtgccatcttagattggatttctttcatttttaataacctatctattgaagcgctattggaatcagaattatcatatttaactaatagatttaatagtttcacttgagtcaaagtgagatgaaatgaatatttcaacatatcattaatgactttcaacattagtatgtgtgcagttaaacgcttaactttaaatttagacatctttaaaacctctcttaaaccatgcctatatctcaagatgatatttcaaatgaacaatactattgcttgagaccattaatgaatgatcataaatatttctttctataaaattagctttccaataactgtgttgttgcataatatcattcacaagtacaccattttcggaagtatgattatctttatctatacttaaaacaatttgtttagttttagcatggctaaattgttgaagacccttacacgataaacgtatagcgtctgaattctcatttaacaatgcggctggcaaacaaatgacacattgtacttcatgtttgaacttcgttacaatcatcgtgtcattttgataaataacaatccctcgtaattgattaagtatatttatgataaaaatgaatattgataatctagtcaaatttatttctttgctagcttcacttataattgacatgtgcataataagtcctcgaaattttgtataatttgtcaaaagttcagtaaccttattaaaatcagacattgtgattttttcttttaagtcattattctcattaatcaaatctacatcacatataattttagaacatgcaatagacacctgttctatttgtcttagcggtaagataaaatagtctattagatgatcaatttctttatcatagtgcgtattcaactcttttggttccagatgatatattaattcaaatactcctatataattatctattaagcgtttcagtttttgaattgcagtagtatttaagtcgttaattaaaaatgcaatcttacatctattactctcaaatgtcatattaaaaattgtggctactagcttttctatcttgcctctttcagtactcgttaacaattccttatattcatgtttaatacgaaatactacatttacattgtaattcactatcttttgaagtaataaagtgatttgttcaatcgatagctcattgcttgtgtcgattgtaacaattatatgcaagttttcaagattaacacctaatctttgaatgatttgtttaatagtataataatccatccaataaaaattacttcctttaatataaatgtttttaggttgatacatttgactcctttttgtaggttcaaaaggtatatcaatctcgcgcatacttgaagaactttgattagtattatcaaataattcaattatatttttatcaatttcaactaattgggaatggttaattgaatgagatgttggactatatctttttctaattaatttaggagtgttaccatacgtttctttaaagaggtgtataaaacgagaataatgattaaaaccatgactacttgcgatttcttcaataggcttcttagaagttaaaatatcaattaagcaatgctccagtctaatatgatttaaatattgaataaaattactataaggtgtcgctttaaacatgtcacttaaagctttgtttgtaatactaacttgattaatgacatctttcctatttatctttttatggtggttgtttgttaaataatcgtgcacttcttcggctactaaatgacgactaccatcgtatgtatttaatgacattaattcaacacacatgtaattaataatcttatcattagcattataagactgttgtttaattttgctgtagattaaatacttaatcaagattctaaaagtgctagcaacctcatttgttaatatcttgccacgcatcatatagtttgcattcataaacttcaaaaatgtctttgcacttacttcaacaacacaacatacactatcatcatgaccatcaatttgatacaaatcattcaacataataacggtgacatcatttctttttacatcatattgttgtagattgattgaaactacacctgtaccttgtagccaatatataatttttaagttcgcttccttcacactactcattttcatacttttataaatatgtagtgaataattatctgtcatcttacatcctcacatatacaaatatattgatttactcctgtttgtctttctcaaatcaattgtcaacatctaatattcactaccaattatatcgccacatgttttttagcagtaacaaaacataagtcgattatatcaaataatacttttattaaaacatttttttatgctaaattaggatattttatccattaaatatacattttcatccaaataccaaagctttcataatcatagaaacttgatcgttcgtgtcgaatttttatgcattttctgattaaaagtcctatattatgcacaaaatatacatttagaattttcagtaatattacaaatttgtaacagacttattttcgaaacattcagttttcacaaagaatgccgtagttataagttttgcaaaatgcaaatttctatacttttaaaattctattgtgtcaagatattagcaaaaaattacaaaacgttaacaaagcacacaaggacgctaatttctgttatagtctttcttgtcgtttaattacgagagataacttataacattaattttgtcacacggacattacgaaaatattttagatttaaaatttttaggaggatatttttaaaatgaagaaaatcgctacagctactatcgcaactgcaggattcgctacaatcgcaattgcatcaggaaatcaagctcatgcttctgagcaagataactacggttataatccaaacgacccaacatcatatagctatacttacactattgatgcacaaggtaactaccattacacatggaaaggtaactggcatccaagtcaattaaaccaagataatggctactacagctattactactacaatggctacaataactacaacaattacaacaatggttatagctacaataattacagccgttacaacaactactcaaataataatcaatcatataactacaataactataatagttacaacacaaacagctaccgtactggtggtttaggtgcaagctacagcacttcaagcaacaatgttcaagtaactacaactatggctccatcatcaaatggccgttcaatctcaagtggttatacttcaggacgtaacttatacacttctggtcaatgtacatactacgtatttgatcgtgtaggtggtaaaatcggttcaacttggggcaatgcaagtaactgggctaacgcagctgcaagagctggttacacagtgaacaatacaccaaaagctggtgcaattatgcaaacaactcaaggtgcatacggtcacgttgcatacgttgaaagtgttaacagcaatggttcagtaagagtttcagaaatgaactatggttatggcccaggtgttgtaacttcacgtacaatctcagctagccaagctgctggttataacttcattcactaattagtgatggctatgttttacgccaacaaggtttcaagagccttgttggcttttttaatttctatgaaaaaaatcgaattggtaaaaatctcaaaatttcgattttcaccaatccgattcactctgtaataaagaataaacaacatacagccattgacacacccaaatttaggcatgtcaaatcggctatacattgataaatttttagttaaagtacttacaaatatacttgccttcaaattctcaattaatttagtcattacaaatcatgacataaaacttacattacatatatcaacatgttccgctacaaaacatattcagtatatgtatagaggatatttattctaagttaaaaccttttcaaattataaccgctacaattataaatgattaaagtgtttcaacatattatatatattccacgctcacattaagttaaacgtgaattcgatgactttttaatacctatccctgtaaaaccatagataattgctataattgcgcataaataacatggtactgtccacatgaaaaattctccaacagagacatgaagttgattcgtatagtaaatacctgatgttccccatggtattaaaggtaagaccatcgtacttgagtcttcaagtgttcttgataaaacggaacgagagacttggtatttttcgaacaaatctttcattaacacaccgaccataataattacaatcgaagcaacacctgcagcgaatacaagcgcaatacaacaaataacagtaatacatattaaacttcctacagaatggatgcctttagaaatagtagttaataagacttctaaacatcctgctttttctacaatacctgcaaatgcatatccgcaaaatatcgttactaatatttgggtcatactcatcataccaccctgttctaacaagcttttcacactggatgaaatatgagactgatgtatcattgagtcgttaaaaccactaaatgttgctttgaaaccatctgtcattttgaaatgatgattaaaagtccccactataatggcagaaaagcttgatattaccatagctggcactgtagccattttaaatagcaaacaaacaatgatcacaattaagggaacccagacccatatgttaatttgataaatctgtgcaagctctgataacaaagtttgaatctgtttatcatttgaatgccctttaaattgaaatccagcaataaaccatactaataaacctatgattgatgcaggtatcgtcgtccacatcatcgaatgtatatgtttaaatatattaactttagtaacaagtgccgctaaattagttgtatctgataatggtgacattttatcgccaaacacagcccctgctataatagcacccgctgccatccctggaggaatccccaattgattaccaatagaaataagtgcaatccctgcagttgatgcagagccccatgctgtaccagttgctacagatgtaacagcacttataaaaaaggctgatattaaaaaatagcttggattcaataaatctaagccataataaatcaaggctggcactgtgccagaaaacatccaactgcctactataattcctaccgctagtataattaaaattgcaggcattgcagtatttaaacgttctgcaatgcctttttctaaatcttgccatgttaagcctacacgttttgcaatccatgtggcatatgctgaggcaataattaataatacttgaattggaatatcaaaaaacacaaagcctgttacaacaacaataaccattacaatcattgtcgaaattgattctaaaaaggttggttttcttttcatcatctatcgtccccttcgcttattgatgagaaacctcttttcttcaatttattgcttttgcataatgctatatccttttctatcttcaagccatcatttattttaaatatttttctaaatcaagcttatctaaaccaatttcttcaactgttaagccttcctcaaagaagtctctctctaaaatggttgatgcaattacaattactgcatctatatttggtgtcggtacatcaataacacgacctaagcttgaccatagtactaaaccatatgcaatatcttcagttaaatatctgctttctacatgatttggtcctggaatttgtgaaaatactgggcttgtattaaacaaacgatttaatggttcatcttctttatcacgttctaaataaccacgttcaatacgtgattctttagctgttgataattcaaaacctaatctacggcctaaatttaaacgttctaattcgattgcatgaagtaatctaactgtatgtttagtaattccttctttatataaagcgaactcgccagcataatcaatgcgaccgacattcaataatgttggtcctggatgcacttcaggattaccattttcaagatttgttttaattaagctttcctcttttactaaatgatcataaatacttgaaactttgtcataacaatcatttagacagcttctatcatatgttgaaaagaagatacgacgtacatttagagataaatcaactgctgcattttcaaaatcgacacgcgtaccatacgtcaacgtattagcttccgctagttgtggttttgtttcaatatgtctatcttctaaaacattcataaaacgaattgaccccattgctgcagccatgttgaagaatatcaactgattatcagttacatgctctgccattacatcagcataatactctatgtatgaagatggaataatcacttgaacaatttcagcatcttttaaaacatattccatatcatcactaatatcagtgaattttacgaaacgttcatcaccttcattattaaaatcaaatccgcccttttcgattgcgttttgaaacttacttatagattgattacgacaatataatttaacatcgtggcctttgctcaccatatctactgctgccgtaactgcgccatttcctgatcctacaattgctattttcataaacaaccctctttctatctttggttaaaattaaaaacaaattatacgtaagacaatataaaaatgatgcgaattcattacgcatcattataaatgttaagtatatataaccttaaattaacctatttaaacgccgacgtccaccaattatttttatttttaataattgtttaataaacatgtttatttttgattatattttgttatagttaaagataatattacaattttcaaaggagtgtctaatatgacaactgaaatgaacgacgtaacaaatcatcaaccgaatcgcaaatccaatgatgagaacattatggcgatgcttatctatttattaagtttattcacatctattattggtccactgataatatggttattgaaaaaagatgaatcgaaactagttgatcgtgctggaaaaaattatcttaactatacgatttcttatattatttggtctatcgttttagtcgttatcactttaataggcgttttcctaattgctaccgatattagtttcattatcattataggtttcatcattacatttatcggtattttatccatattcgctttctcaatattatcttttgtattcacaattattgcgtgtgtcaaatattataatggccaagaatatgtaatacctttaacaattcgatttatttaaacatattacaaataaatatttcctattaattatctgttaatctcattgtaactttgactaatttttattacaaaattagtcaaagtttttttattcttttacaaatcaataacattccccacaagaagcattaattttgttaaagtaactattgtcatcaattcgagatgtgagaataaaacagtcgctacgttttatttataaaaaaagatatagaactttggaggactttattcatgaaaaaattagtaacagcaactacgttaacagcaggaatcggtacagcattagtaggtcaagcacatcatgcagatgctgctgaaaattatacaaattacaacaactataactacaacacgactcaaactacaacgactacaacaactacgacaactacatcatcaatttcacattctggtaacttatacactgcaggacaatgtacttggtatgtatatgataaagtaggcggagaaatcggttctacttggggaaatgctaataattgggctgctgctgcacaaggtgctggattcacagtaaatcatacaccttctaaaggcgctatcctacaatcttctgaaggaccatttggtcacgttgcatatgtagaaagtgtaaacagtgatggttcagttacaatttcagaaatgaattatagtggcggacctttctcagtaagttctagaactatttctgcaagtgaagcaggtaactacaactacatccatatttaatataaacacgatgatacatattgtcttgaaacttaattctagtacatatgtcatcaaaaaactttgagctttcctttataggagaagctctttttttgctatttttcgttgccacctacttatttatatttcccccatatttataatattaattttttctaatactattaactttaaaactacgttatctaatttaattgatccagtttttccacattacaaaattcatagttctacagtgcctaagttatatcacctccatcaaaagtacgcgcttacatcattgatacacaagacatcatgacatagttgtatactgtctaatcttctactatactaagataaaaggagtgatcttttatggaaaaagtttatgttgctggtgcaataccagaagtagggttaaaacttttacaagaacattttgaagttgaaatgtatgaaggtaaaggattagtcgataaagacactttaattaaaggtgttaaaaacgcgactgccttaattagtttattatctacaaacgttgataaagatgttatcgatgctggtaaagacttaaaaatcattgccaactatggcgctggttttaataatattgatatcgagtatgcccgagaaaaaagtatagatgttacaaacacacctaaagcatcaacaaacgcgactgctgatttaacaattggattagtacttgcagtagctcgtcgtattgttgaaggggaccaattatcacgtacaactggatttgacggatgggcacctttatttttcagaggtagagaagtatctgggaaaacaatcggcattatcggtttaggtgaaattggtagtgcagtagctcgtcgtgcaagagcatttgacatggatgtgctatacactggacctaatcgcaaagaagaaaaagaacgagaaatcggtgcaaaatatgtagatttagatacactattaaagaatgcagattttatcactatcaacgctgcttataatcctaaaatgcatcatttaattgatacagaacaatttaaaatgatgaaatctacggtgtatttaatcaatgcctctcgtggtccaatcgtgcacgaacaagcactagtgcaagcattgaaagataatgaaattgaaggtgctgcacttgatgtatatgaatttgaaccagatattaccgatgacttaaaatcacttaataatgtagtattaacaccgcatattggtaatgctacatttgaagcacgtgacatgatgtctaaaattgttgctaatgctgcaattagtgccgttcaaggtgagaaaccacaatttgtcgttaactaataattgaatttattataataacattataaaaacaagaacccccatatgttgagctctcgtttcaacatacgggggttttcatattgttgtattatttctctttcgatttatataagaatttagtttgtccagctgctaatgcatttggcatcattttcataatacgatttctaactgcaacaaataaacgactacgatattgggcaattttaccgatttttctagaacgcttaattacttttgcagtatgtttgacacgtattttatcataacgctgtaatgctttttcaaagtcgtatgcgttaaaacaatttactaatacgatagcatcttccattgcttgtccagcaccttgccccatattaggcgttgtcgcatgtgctgcatctcctagtaaaatagtacgaccataaacaaaagatttgagtggtttcaaatcataaatattatgcaataagatacctgtttcactttgtttgtccaagatctctctaacttcatttggatagtgattaaagtatgcttgcaaatgaggtttaccaaacgaactatatttatgattgttttccttcgagttaattgtaatgaaccaatatgcttgattatttaataacggaacaatacctactcttccttttcttccccagtattcttttgcacaatccggatgctttaaatcaatatcatcaattaaacctctaaagcatgtatacccttgatataatactttactgtcagcatttacagattgtctcactttagaatgaattccatcagcaccaatacataaatcaaatgcttcactctcttgttccgcgaaatgtatggtaactttatctgtctcattatctatatgcgtaacttcatgatttgtaaatattacatcatcttttacataagatttaataatgtcaattaatgtttggcgtggtaacgtcacattcaatgtattactttttaatttaacagtagttaacaggcgatctttgtcatctaacactgtcattgtagataagatttgcccagcatttttaatacctttagctaagtcatgattacctagttttttaagcacattatctccgataccaatcccagcgccaatttctttaactgactcatttttttcaaagactttaatagtatgaccttgttcttgtaataatgcagcagctgttaatccaccgatgcctgcacctataattgctatcttcatattgtcacctctatatttttcattcttttctattttatcacatgcactattgtttaaaaatgactcttggaactaacgtttcatttttaaggacttaagtgtattatctgcaccattgtacattacatgcacatttagacagcaatattcatttacatcatgtacatttgtaacaatgatgtgggatatagcatatttgatgctatatagcgttttttgttaggttaaaatccatttaactaacacactcagaatgcgctaaaggagctcgaaacaataaattgttccagctcctttaagcaccgatgtcttatttataatatgtttgtctaatatcatctttctttataccaaactgcttataggatttatccattaatttggcaattttatctgcccatcgaatgtcactcgcatattgatgttgcgcaggattttctggattccatcgcatttgatataaattcagttgattgttttcaaaatattcattacgaatgaactttgcaccaccaataatcgccttatctggtgatgtccattgttccttttcagcataacttttcccactacgaacagcactactatcgaatgctcctataccaaaaaagttgtaatagcgttttttcccatctttaatgccttttgctaattctgatttgccgttacctgtttctactaatgcatggctaacaagataaatgacattaacctcatatttttcttgagcttctagaaaaactttccctcgattttctaaaatccccttaccttttagcaattggttaacttcagattccgacattggcactttttctgtgatatccatatacttcatatcattgtctttatgtgaaatagtcattgctttagcaatttcattattatttgcttcaacaaatttaccatcctcttcttttgtctgtacaatacctttcccttgttgcattgaaacagcctcatcaaaagagtaattcacatcatttttaaacaatttagtttcattcacgatgagtaatacagcaaaaacaactaaaataactatcaatagtagcgttgaaatgcgtaacttgaaattcttcttcatatagacaaaacctcatttttcttacttagacaataaaaaatatgccactacaatcgctaatattacgattaaaaaagaagcgttaacgattactttcatcgttgttctatctctgaacatcatattaaagacaactagactaattgataatgaaacagcaaaaaaagtaatagctaacactaatttcatcataaatagacagactaaacctatgactaataatgtattagaaattacagctgacgtttttaacattctcgaattaatatgcactcaccctttttatttaaataacttacataatcataataatacatgatgtttcataggcctgtcgatgattgattcacaatagcacgtgatttttttgtttttcaatattattcatttattccatcaaaaacaccctttttaatttttacaaaaattaaaaaaagtgctcctacactgcttgcatgtagaaacactttttcattgtaatgttattcttctcgagacataccttttagcatattaagcatgtatgttaaactacggttcatgtcgtcatctttcaatacgcccaatagacttcttatagttgtcttagcatttggactcgcttgattggcaacgtgtaatcctttattaactttatttaggaagtcgcttaaatctgatacattgagttcacctaataaaaataccattgaagccatattagataatagccctgtataaatatctttattaagttcaactgcaaatttatttatgatgacttgacgtcctcgaattgcaccatttaaagcatctaatagttttgcatcatctaatgttttaataagcttgattgcttttaatatactatctttattcgctgcaattgcctctgtaacttcatttaaactttctaacttaatttgttcttctgatttttctaagcgtctaattttagaagatattctctcagccattatttatccacctgatttcccgggaaaacataatctgaacgttcccattttttctgtacttgaacactgtactgcggatgacgttttttattgacacggaaattattagggttcaacggtgacttaccacgtttcgtaattacctccaaacgacagctagtacgtttataagatggtgtatccgtgtattgatcaacatcactattagttaataagttaattgcacctagatctccattttccatcgcatcattatttaatggaatatagatttctttacctttaacacgatctgtcacgtgaacttgtaataccgcttctcctgtttcagaaatcagcttaacttctgcaccttcatgaatgcctctatcttcagcaagctctggagaaatttcaacaaatgcacgtggcactttgtatttaatcattggtgtttgataagtcatattaccttcatggaagtgctctaacaatcgaccattgtttacatgaatatcataaatttcatcttgcttaaagtaattatcaaatgataatgggaataattttgctttaccattatcaaaattgaatccttctaagtatagaataggctcatcagtaccatcaggttgtactggccattgtaaactattgaatccttctaaacgatcataacttaccccagcatatagaggtgttaagcgtgctacttcatccataatttcactaggatgcttgtaattccaatcaaatcctaatctattagcaattgcttggaaaattttccagtcaggttttgaatcaccaagaggttctaatgcttggtataaacgttgaatacgacgttcggtatttgtaaaagtaccgtctttttcaagtgaaggaattgctggcaatacaacatctgcgtatgttgctgtgaatgttaaaaattcatcttggactaccatgaaatctaatttttcaaacgcagcttgtacaaaattaatatttgaatccacaatacccgtatcttcaccatataagtacaatgagtgtacttctccgtcatgtataccttctaccatttcatgattatctttaccagcttttggattcaatttaacgccatattctttttcaaatttagcgcgaatatcatccgcttcaatactttgataaccagtaatcttatcaggcatacttcccatatcactacatccttgaacattattatgtccacgtaatggatacgcaccagtaccaggacgacgataattacctgttactaataataagtttgaaatcgctgtacttgagtcactaccaatgtcttgttgtgtaatacccattgcccaacaaattacaacagattcagctttagcacattcttcagcaaatttaatcaattctgattcaggaatacctgttgcttcttcagcaaaagccattgtaaatgtttctaatgatttgtaatattcatcaaaatcatctacccactcatcaataaatgctttatcgtgtaaatcatgatcaataatatacttagtcactgcacttaaccacgctaaatccgtacctggtttaggttgataaaaacgatccgcacgttctgccatttcatgttttctaatatcaaatacatgtattttttgtccaaataatttttgagcacgtttcatgcgtgatgcgataactggatgagcttcggctgtattggtacctatcaatacagacattgccgctttttctaaatcttcaatactacctgagtcaccgccgtgtccaaccgttctaaataagccttttgttgcaggtgcttggcaatatcttgaacagttatcaacgttatttgtgccaataacttgtcttgctaatttttgcattaaatacgattcttcattcgtcgctttagaagaagaaatgaatgatagtgcatctgggccatacttttctttaatagatgtaaaattatctgcaatgacatttaaagcttcatcccattctacttcatggaactcaccatttttccttactagtggtttagttaagcgttgatctgaattaatatgtccccatgaaaacttacctttaacacaagtcgcaattttatttgctggagaatcatgtgatggttgtacttttaaaatttctctatctttagtccaaacttcaaatgaacaacccacaccacaataagtacacactgttttagttttcttaatacgctctttacgcatttctgcttctgaatctgagattgcaaatagtggaccataaccaggttctgcttttttagttaaatcaatcattgctgctaatgaaccaggttccgtatcagtcatataacccgcattaccttccatattcacttccatcatggcattacatggacatacagttgcgcattgaccacaagatacacatgacgattcattaattggtacatcattatcccaaataacacgtggatgttcacgatcccaatcaattctaatagtttcattcacttcgatatcttgacatgcttctacacaacgcccacataagatacattgatttggatcataacgataaaatgggccataatccttttcatatggcttctctttatattcatacgtttgatgctgaagcccccatgcatccatcgtattatgaatttcacaatcaccattattataatcacatactgtacaatacagcatatgcttttctaaaattcgatcaagcgcttctttttgagcatctttcacatcattgttcacagtatttacagtcattggacgatcaatcaccgtactacatgaacgttcaattttaccgtcaatctcaacagtacatgtatcacatgtttgaattggtcccatcgactcgttataacaaattgaaggtacaaaagtatcttgtgatttaataaattcaagtaaattcgtacctggttctacaagataatcttttccatcaagtgtaaccaccaaatgttcttgcatattactcaccccgtctatatatattttccgtaaatgacttttaataaattgctcatatccacctaaaataacgatgccccacacatctttcagatagaattaatttaattgtattactttatgtactagttgttaagtgaaattttgtattttgcctttttacaatcatttttatttgaaatattttgcgcgaaattaaatcatctttttgtttaattgaaaataattatcattattagttttccaattatctgtttcacgcttttcagtcatatctttcacaaccttattaatgacaatacttaataatcacctcacctaaaaatcgttatactatttataaataccctttttctgaaaattaataacccaagtttgataaatatctactaccatttagaaggtaatatttatctttaaattaaatttgtaatggattaatttataaaaatcaaatcaggcattaaataaaatagcccataaatacaaagtgttatcaccttctatttacgggctattagttctattcgttattctatttacagatcattctatctaattaatttgtgtacaattttgataacttattttcccttagtttactactctagattatcttttaataacttagtactttcagcttttgactgctcactaggaatgaagtagtacaatccgtcactttgaatgccgccttgaccactcaattgatgtttattaatcgtgtcattagcatctttataattgcttctaatcgtattcaaatcacctaatgttaaatctgttttaacattattttgaatttcattcattagactattaaaatgtgtaatcgatgatgggcttgcaatcttattggccatcgcttcaagcacaatttgctgacgttgttgtcgaccaaagtcaccaccagcaccttcttctttacgacttctaataaacttcaatgcttgatcaccatttacatgtgtctgctgtccttttgtaaaacgaacaccatcaacagtgaatgtatcattacttactacatcaacaccgccgatgctatctatcatattatgcaaaccatccatatcgattgtcgcataatgatcaattggcacattcattaatttttcaagtgatttaacagccatatttggtccaccatatgcataggcatgtgcaattttttcagtagtaccacggccaacaatttccgctcttgtatcacgcggtatacttactatttcagttttcttcgttttagggttgatagataaaatcataatactatcactacgctctccgccaccctttttcttacgatcagcatctgaatcgacaccaaataaagcgattgtgaatggatcaccatcgtttaaactcacttttttatctcttaattctgaatgattgcgatctaacggattgtgtatcttattaccagtaataaaaattttagcagctacatacacaacagctacaatcgctaagattactaaaataccgaatacccataaaaatatttttttcggtaggctcattttacttttagacgaacgtttcaatcccaccactcctttactattccttacatactttgtctgttttctctatttattatatagtaaaataatttttttactatacttctgtagacgtataactattttttatcattttttatctctagagaatatctatctgtatttttgataaccaccatttgcatttaaaattttaagtaccgtttcatgacatgctttattacttataataaaaggtgcaccctttaaatgatcaattgccttaccatctaaagtcgtcatttttagattcaatagttctgcaaataaaaactgtgcagcaatgtcccaaggtttaggatttgtattaatatgtgccccaaattgaccttttgccactcgcatagaatctaatccgcaagcaccaactaaacgataactaaatgaggcgtcaaataaatcttgcaccgtatctagattcatcacttgtgcattaaacgatataatagcgtcttccaattttaacgatggtggttcttccatcttaattccattacaaaaagcaccttctcctcgtattgctttataaagctttttatgcggataatcatatacgtacgataacattggtttaccttcataaaaatacgccaatataatacaataatcttcttgctgttttactaaattggcagttccatcaatgggatccataatccataaatgattaatttcattcgtaatcatttcattacttttttcttccgctaatagttggtgttccggaaaatgtgttgctaaaaattgttggaattgttgttgaatctgtttatctacatttgtaactaaatcaaatcgatgacgcttagtttctgtagtcatttccataattaattgcggaataacattgtctatttgtttcaaccacgaacatattaacttatctatttgctgtaatgttttatctgtcatttcgtccaccacttctcatatcattatcattttattattaccctatattaaaagaatcaacaatacaactgaagacttcttcattttatgcataaaaaaatcggctagtcacgtgctagccgacaaatagaaaggaaagtaagtaataaatattgaagatgttgtgatgtaacttgaacgattaaaagctatctgttatatagctctacccctttgtttaatcgctccccctgttacaagtaatatcatagcacaatcttttttaaaatgtaagcgttttccaaaaaatttttacgattttttttaaaagatattgaaaatgtcctcattgtcactcttatgttatactttgtgtaatatatcatcttttaggaggtggctgtcatgaataaagctgaaaggcaaaatttaataattactgcaattcaacaaaataaaaaaatgaccgctttagaattagctaaatattgcaacgtatccaaacgcacaattttaagagatattgatgatttagaaaatcaaggtgttaaaatttatgcgcattatgggaaaaatggtggttaccaaatacaacaagcacaatctaaaattgcattaaacttatctgaaacacaattatcggccttatttttagtgcttaatgaaagtcagtcgtactcgacattaccatataaaagcgaaatcaacgcaattataaaacaatgtttaagtcttccacaaacacgcttaagaaaattgcttaaacgcatggacttttatattaaatttgatgacacacaacatatgacactcccaatgctgttttccgacattttaatttattgtacagaacgaaatgtgatgttagtagatcatagggttgatgataatattaaagctgaaaacgttatatttattggccttttgtgtaaacatggacattggcatgcagtcatttatgacattgctcaagacaaaactgccgaactcgaaattgaaaatattatagatatttcgtattcattcggtaagacgattcaaaccagagacatatccattgataactatcatcaatttttaaaccccatcgattcctaaactatggagtcgatggggttttatctacgcataaatacttattactgatataacgaaagaaacaaaattatttgctatatgtaatgcaattgttgaacctaggtttcttccagattttaaataagtgaaaactaatatgatggatagtatgagatatggaccaaactcaaacggcgactttgcatcagtcacatgaataaatgcaaataagaacaccgaaacaatactcatagctataaaattaaacttcttacctaattctccaattaaaatatgtctaaatacgatttcttcaactattggacctacaatcacaattaataagaatgctacaggtaaaaatgcaggcacttcaaacattttatttagctcaagttcattggctgtttcactatattgcaaatgtttaggtagaaactgtgtcatatattcatatgtataaattaagatgagagcaataatatacgttattgacaatctaagccaatattttttgatatacgcaaaaccagctcgaagccttgatggcatcacttttaaatgaaataaataaaatgcgccaatcccaatcgtatatgctaaagcttgtgtgatagtcgctacaaatatcagattactatcgatttcataataaccaaacaaaattggtcctatgtaagctgcaattgtgagtgcataaaatataacacctataattggaattataagcaaatctctccatgctatatctttaaacgtgtatttctttttttcattttccactgttatatcctttcctgtttaataattgatttttggaggtacttctacatgataaacgaaactaagtatatgagacaacaaattactaatttgattcaaatcattgatacgattaaatataatactttaatgacagattggaacattcaaacgcatatttataaatttaaccaaatagttactaatgaattgaataagttcaaaggctttgaaacatcatatataataaacgaaaatcaagtttcctattatgaaattataacactacttaataaacgtcccctccgacaagtcgactatggtaacaaaattcaatatcttaatttttatcatacagaactatctaacgcattatttgcaattaaatttgcccattaacctatttttcataaaatgtcatttaaacaagttatttattaaaattcactttattacataaattatacaattaaaaagtttcttcaaattgtaaagatgcattaatcgagttataatcataatgattaagatggtagatttagtcttatataactacatttactaagatttaaatagatgagtacataatgtataaattgggaatatacagtatgacttacggtaatatatcaatatattgatatattatttgcacatgggagtatgctattttttatctatacatcttaaaaaaatttacagttttacaattcaatatcattaaacaaacaacatattcagcttatttttcattctcttacgttacaagttgtaaataccatcgcgttaaacaacaatagccaacgctaataaaatatattgcgttaaagtggagtgattaatatgtcaaacgtactaacagaaatagatagtcaatatccatatatgactaaaaatgaaaaaaagatagctaaatttatactaaattcacctcaaaaggtgattaaaatgaggtctcaagacttagcaagcttattagatattagtacatcatcagtcattcgattcagcaagaaaattactgatggcggttttcacgacttgaaaataaatatatctaaatatgttcctaaagcatcatcaatttacaatgttgaattaatgaataacgaaagcacagaatctttaagaactaaactccatacacgtactacacgcgcacttaatcatgcaaataacgaattaaatgataaaactattgatcaaatatgtcattgtttaaaacgttctgagacgatttttatatatggttttggcgcatcttttgtagttgctaccgacttataccaaaagttatcaagaataggtcttaatattcaacttgttcaagaaacacatatttttgctacattattagcaactcacaattcgaacgacagtgttattcttattactaacaatggtacgcaaagtgaaatgcaatcaatggttaaagttattgatgactaccatatacctataattacaattactagtacaagggataatcccgtagcacaggcatcaaatattgttttaacttatgggaaaactgatgaaaatgagatgcatatgggagcaacaacttcattatttgctcaaatgttcactattgatattttatattatcgttatgttgcattaaattatcacgcatcattagatttcataacacaatctaaaatggctttagataactatcgtaaacatttatcaaatattaactttaaacattaacagtcttatataaattctttaatcatgtcatataataatttatgcatcattttcaaagcttacatgtcttttatcttgtataacatacgcatatgaccaatgatttgataaggccattcaatttcttatattaaaaacaaacgcagttgattacaggattcattccatatatcaattgcgtttgttattttaataatgctattttttattttaaagcccacagtaaaaactaacgataatattgccacttataagtttttcacactacaacttcgatttaagctatatttataaaaaaatgcgcctactcataacattctttggctatttaactttaataagctagggccaaatttgtcataaaataagcgcacattataatcatactattttgcttttacattatttttattatatctaataaagtaataaatcgttacaatcgttaagaagatgacaccaattagcactgatattctagtttcaacattaaataccataccaaccaatactaatattaagaataagattgttaaatagttagttactgcgccaccaggcattttgaatgggtgaccttccaattcttcaggatgtaattttctaaaacgtaagtgactgaataaaatcataaaccaaggaatcatacctggtaaaatagacgcactataaacgtatacgaaaatactcttcgctccatcgatatataaaggtaaaattacgtttaataaagcaccaattaaaataccaagagatactgctacaacagtgtacaatggtacaccatttctcatgattttagtaaatatttttggcatttcacctttatgagcaagtgtataaatcatacgactcgcactgaaaatacctgagttacatcctgacattgctgcagttaatacaacaaagttaattaatccagctgcaaatgtaataccgattttagcaaatgttgcaacaaacggacttccaatgtctcctaattgattccaaggatacactgaaacaataacaaaaatagcgcctaaatagaaaattaaaattctccagataacaccattcactgctttaacgatatttttctgaggatctttagtttcacctgccgtaatacctatcagttccacaccttggtatgaaccaattacaattgataatgcaaagaagaaaccaacaataccatttggcataaatccgccatttgtccatagattagaaatacctaccgcatggccaccatttccaaaaccaaagaaaataagaccaaaaccagcaataatcattaaaataattgttacaactttaattaaagcaaaccaaaattcaaattctccaaacgcttttaccgagaataaattcgctgccattaataataaaatagcaataacaccaggaatccaagttggcaattccgggaaccaaaacttcatatattctcctactgcgatgacctcactcataccaactacaatccattggaatatattactccatgctgtcatataacctgctgcaggatgtatataatcacttgcaaatgttgcaaatgatcctgttgtagggtttaaataaatcatttcccccattgctctcatgattaaaaataaaaagatacccgcaattaaatatgcaaggataactgatgggcctgtccatttaattgtacttgtggcacccatgaaaagccccacgccaatcgtaccaccaagtgcaatcatttgaatttgacgggcactcaatcccctttgtagttcattgttctccataacttcttaccccatctctgattgatactaaataaatccataaaaaaacttattgccgtaattatactataaattatcgattttggtacattaatatttgcataccatgcaatcgtttacagaactactatagcaggcttttgcaactttgcaaacaattattttgtgatttttctaaaaaattaaaaaagttgctcaagtaccgttgagtcacatacaacttcagctattctcggtaattatgatataattttaataatattaaaaaggagtatatcaatgttaaaacaaatactgccacgtgctacaaaaatatcgatactctttgctgtagcatttttcatcataaattatatcggtatggaaaaacctgacatcctatatttagttggaagaactattattgcaacacttgctttcatactcatttgtcttacattatttactattattaattctccagagcgcaagattaaactcggtacgactttaccgattgcattaattattggtatcattttcggcgccatatttttaacggtacaaatcggtgtcatcactgggttaatcatcggtgtgattgctacgtttatttgggaattgattgaaaaaaataaaggaggtcgttcatcatgacaacagcattaattggtgtaattgtattaatcttactaattattagctttgtgccaaactaccgtgctatgaaatcagcaaaagaacaaggaagtaatgcaacaagagctacaattatggtaggcatagatattatcttaattgtacttatcatcgtgacattattattaaaatatatgtaactatttaaaccaccctatctcatacataaacatgaacgttctgccatttcacatacatatggtcgtccatttaatgaggtaaggtggttttctcgttaaagtttaccttgtaatagtaaaaaatagccaattgttgcgagtattaagtaaatcattgaaccaacaacaaaagatcttacttgcacgcgaaatggtgtctgtttgttaaatataggaccaatcaccaaatttccaacgcctaaaattactggaccagctagaaaaaacaatataatgtaacccatcatgatacgcctcctatttcgtaaagaaacgcgctacaatttgatcgtaatcaatatcttttgctacataatctacattagaaaagtcctgtgcgcttgtcattttattcgtattaacaataacatctaatccagctgcaatcgcggctgttgcaccatttacagaatcttcaatagccaaacattgtgtcggcatataatttaattgttgtactgcagataaatataattcagggtcaggtttaacttgttcaacatcttctctaccaacaactacctctatataatcgtctagacctaatgctttaaaggtgggcattatttccgctttcacactacttgtggcaattgccataggaatgtgacgttgctttaaaaatgccatcaatgatttaatcgtatcaatcatcggtaatgttgtactagtaagatgatgttcttcataaagtttatctttattttccgaaccaatcgctttaattaaatggtcatgcaaatctgtagctgctcctccaatagaagaacgataaaaatcaatgcttataggatcggcattatgcatctctaaatgtttattaataacattaaataaatgttgttccgtatctattattgttccatcgaaatcaaatataactgctctatacatatatttactcctctattttttctctttatcaaagcttaacatagtccgatgaccacttcattctattagtgcaattataacttttttgaccaatactttgctaaaataggccctgttatattatgaatgaaactaaacactgcgcctggtactgctgcaattggattaaaatgcaatgctgctaatgacacagctaaaccagagttctgcattccaacttcaatactgactgctttttgatcttgtcgatctaattttaaaagacgagctaaccaatatccaatcgtataccctaatacgttatgtaaaataactactaaaaatattaataatcctgtagttaagatttggtgcttactgccacctacaactattgctaaaattaatgaaatagcaacaactgatataatcggcaaagctgtagaagctttttcagcaattttacgattaataatttgcaaaacaatacctaaagcaattggaattaatacaacttgaacaactgaccacaacatactcaggaaagatacttccaaccattcatttgcaaatagatatattaacgcaggtgtaacgaatggcgctagcaacgtagagaccgtcgtaatagaaacagaaagtgctacgttagctttggctaaataactcattacattacttgatgtcccacccggacaacatccaactaatattacgccaacagcaatatcaggtggtaaatgaaaagactttgcaattataaatgctaatgtgggcataatactgaattgtagacagacaccaataattactgctctaggtgctttaaagaccattttgaaatcattaggtgtaattgttaatcccatacctaacataacaataccaagtaaataaggtacccacttacctaatgtcgcaacatgttgtgggaaaataaatccaataacagctgctactaacatccataccaaaaaactcttcgtggcaaatatactcaatttttgaaacattgttaacacatcctcgtcgataatattgaaaaatattaccataagaccagtaaggttacaattacttttctgaaaattaagattatttagccattctcttcttattgcaaatattttatcactgataaacaattattttaaacttcattcaaaagtcttagtgaataaagaaaaaaagcgtggtaaaatcaacttgaacaaaattaagtcacctttataaatattaaacgtgtatttaatgccatgtattcctcgggaggtcctcacatgttaattgataaattcgaaacatacatcatcaacatcgccggtttaaatgaccgtactactagaaaaaaattaagtaagttatgcaaaagtgtacaattttgtgatgcgttgcaattctcaataaacaaacagtttaatcagtatgtattagaaattagcttaccaaagcaacaacttccatacttcatttcatttttaagttttcatcagtatagtattttccaagtactttcaccaaagaaaataaatgaattacttgattctgataatttatatcaatctgcaaagcgtttcgatatcaatattgatggcttgcaagatgctttcattaaagacaaagtcatcgatattatgaatatgttccaaaatcacactgatatcacttatacgttgaataagtctcatgcacatattatatgtacgccagaaatatttgctaaattgttacatacgattgcaactagaaatatcgacattctatctgccaattatagatcgtcatctatgagcaaagctcgtatatcataataaaagacacatctatacgatgatcatttacaatgattgcgtatagtgatgtgtctttttttgtattatttatcttcggacgattgatcctcaaccatttgttcaaatgcttcacgaacttgtggtactgtcatacctactacaacttggatactcttaccactctttactaatccgtgtgccatttgttgatgcgtgaaatattccgtatccgcaactttactttcatcataaacagttaagcgtaatcttgttgtacagttagtaacatctttgatattttctttgccgcctaaaccgtcgaggtaatacgcagctttgtcttcgtattcattacctgttgaagcacgtttagaatctacgctatcaccttttttatttttgtaatcttgcttagaaaataatttaacttcctcttctgttttcttacgtccaggtaatggaatatcaaatttcaaaattaagaatctgaataagaagaagtaaatcgctacaaatatcagaccgataataacttgtgcaacataagtaccccaatgttctttacctaatggcaaccagtttgttgaaataaagtctaacaagccaccacccatgttacctacaacaccaaatgcgtacattaaagtatccattgatgctgctaaaactgcgtgtaaaacaaataagtatggtgcgatgaataagaatgtaaattctaatggctcagtaatacctacaacgactgctgttaatgttgcaggaataagtaatgctgctacttttttacgattttctttaggtgtcgtagcatacattgctaaagcaatacctaaacatccaaatactttcccatttccttgaagcataaagccataagggaattgctcttttaatggcttagtactcttagcaaactcatttaaatgttgtaaccattcagctttcaagccatgattgactactactggtccaacttcaattggtgcataaataaagtgatgtaatcctgttggtattaatacacgttctaagaagtggtacagccaaacaccgatatagcctgaagcgatgataaagtgttgcattgaaccaataccgtgctgaacagttggccaaataacacaagtaattgctgctaatggtaacatcacaaaaaatgaaattgtaaccacaaatgttaaaccttggaatacaccaaccatttctggtaatcgtttactgtagtatctattgtgaatccacgtaataatagctgaaataataataccacctagaatattcgtatccaatgtggcaatacctgcaattgattttaaaccaggtacattttcaacgcctttttctaaattagcgccaaatgtatgtggccattgcgttaaaatggcatttataaatgtattaaacattaagtaacccatcaatgctgcaagcgctgcatgacctggtgcttttttagctaaagaaagtggtaaacctacaacaaatacaacttccatatgcgtaaaaataacccagccaccagattctatcactgaccaaaatttaaaccaaaacgtatgttgatctgctaaactccccatgattgtaggatttttaaataatgtcgcaaagccaagcactatcccaaagaaagcgaacattaataccggtacaatcattgcactaccgaaacgctttatcgcattcatcttctattccctccatatcatctttcctaacaatacatctaattagattcatttataaatagatgtcttactatttaaatataatatatagtaaacgcttacacacctacaacgacattgacgtattttgaaagtattttgtataatcagattatcttttcatatagtgaaaattttttcacgaccttatatatgacatcgttgtatttgtaatacattcgttttaaacgcataatcaaacctatatcaatacacaaatatatataatgacatacaagattttaatgtaataacgatctatcacacatttattttcaaggaggttgaatatgtttttagatgaacacattaatcgaaactttgataaacttaatgataatgatttacatatcgctcactttatcaatacacatatagatgaatgtaaaaatatgaaaatacaagatttagcgcaattcacacatgcctcgaatgcaaccattcacagatttacacgcaaattaggttttgacggttatagtgattttaaatcgtaccttaaatttgaaagtaataagacacaccaattaccttctaactctatcgatagtttcaaacaagaaatcgatagtacattcagttatttagaacgcgttgattaccagcttcttactgaaaaaatgcatacagcttcaacaatatatttgtatggtacagggcgtgcacagttaaacgttgcttcagaggcacagcgtatattgttaacgttacataatcatgtcattgtacttcatgatgaacatgaacttaaaatgattttgaacaagagtgaacctaatgatttattctttattatttcattatcaggtgaaacacatgaattattagaagtaacaaacttgcttcaacttagacaaaaatactttatttctgttactacaatgaaagataatacccttgctcaaaaagcaaattacaacgtctatgtatccagtaacacattctacttaactgatggtacagactattctagcttcatcagttatcatatattctttgaaacacttgtaagaaaatataatgagtatttactacataatgatatttcaaattagaaaaaaggaagttatgatttaatggccttgagcctatcataacttccttttatcattttattgttgtgttgatgtttcgataacgtggtacatcttatcaaacatcaattcgaaaccatgcaccatggcatcatgatattcttttttcttttgcttgtattctaaattagtaaatcgtctttctttttcaactaatgaacgataataaaatagcatttgggtgccacctgtttcacgttcaaaaaattctacctcaatgacatcttgtgtttcacttagtccaggcataccgatagtcatcttaacgtattcatccataactaaagattcataaatgccttcaatcacatttactttgccattacgttgttgatctacaatacgatatttaccgccttctttaacgtccgcttcaatctctttattcgttctggctgatgtcataaaccattgtttcaacaaatctttctttgtccaagcttcgtatactaactctggagaaaatttataaagcttttcaatttcaacttcgacatgttcattctctacattaaattttgccactgttgtccacccactttcgctcttacttttattttaacgtatttttgctcagttccaaacatagatgatcatcatttttaaaagattagcgttatacggtgagtacaacatgatctgttaatataacaagccaccttacttggctacatcgatatattgttaagcattaatgtttcatttcttgactagtgttcttttttagctttggaaaattaaataaaatcgcaataagtccgcatacacctaataatataggataaatgctgtatgggaataacattaatggtgaaataccagctacaccagccgctgaaatgacttgcgggctatatggtaataaaccttggaagcagcctccaaatatatcaagaatacttgctgatttccttgaatctacatcatattcatctgcaatatttttagctaaaggacctgacataataatagagatggtgttgtttgccgtggcaatatctgcgacacttaccaaactcgcaattcctaattctgcgccacgctttgatttcactttagagcgaacaaattgcaacaaccattcaataccaccattgtgttgaataataccgactaaaccaccaattagcaacgcaatcatagcaatatcttccatgcttataatacctttggacactgcatctagtagtcccatccaaccgaatgaaccatctatgagaccaatgattccagctaataatgttccgccaatcaatacgataatgacatttacacctaataatgctaataccaatactaaaatatacggtacaactttaattagattataatcatagtttttagcatgatttaaagaaatgccattcgttaagaaatacagaataataatcgttaaaatagcacctggcaatacaattttaaagtttactctgaatttatctttcattttcgtatgttgtgttctaaccgcagcaattgttgtatctgaaatcattgatagattatcgccgaacattgcacctccaacaactgtagccattgctagcgcagttggtacatctgtcgcttgtgcaaatccgtaaccaacaggtgctattgcagcaacagttcctacagacgtccccatagatatagaaacaaacatacaaatcacaaacaatcctacaataattaaattttctgggattaatgatagtcctaaattaactgtcgactttacgccacccattttttcagctgtatttgaaaatgcacctgctaaaataaaaatcaacatcattaaaataatgtttgaatggcctgcacctttcgtgaagacctcaacttttttagcaaatgattcttttcgattcattaataacgccacaattaccgttatcgtaattgcaacatttaatggcattgaagtaaaatcacctgtgataatacctacgcctaaaaacaacgccacaaataataacaaggggaataatgcccaagcattgctctttttatgtacttccatcctttttacctgctttccaattaaaaatacctctttctcacaaacgatgaagaaagaggttttcatgtgctttacctgcttatcttcaaaccattacggttactggaattggcacattcgagatgttgccgaggcttcatagggccagtccctccacctctctagataagtgatgcttatttacgtttacgttacaagataatccttagtacgtcaatcataaattaatcaggagtcgtataatatttttcataaacaatcattgctactgtaataataatcaaaacaataatgctaataacaagtaaaagccaccatttaagcattaatgcaataaaaatgaacacgatagacacacttactaatattaatgatatgactttaaattgctgaacacgttgcttggagatgactttcaactgtttgtttgatagacgcgtattttttatactgattcccagtatattttctaatatttgaaccaatacgatacttattgcaaatataataattggtaaaacatcatagctccctatagttaatgtataaattacaaatccaatgtaaagtaaccctgagacaaaggataaaaagtatgcgacgtatttgttaaacttaatgatatgctttttaacgttttgatgggtaaaccatacattcataataatcgcaactgctacaaataatgtgaatactatatataatggtaatttttgttcaggaaaaacagtcgctattccaaaagctaatgctaaaatcaaaaataatatagctctagatactattaatgccataataacaacccctttgtttaatatcgagtttgcaaatttacgtttatcagcatttctatgatcagtacttctacgggtagcgtttctatgtaatttacatcatcttaacatataaatacttcgctatttaattgaaaacatatcttattattctttgtccgttctgacatttaatatctaaccttaggcatttcacttgttaataaatttaactttcttccactaaccgtccctaaacccaatcccgcaacagtttttaactttttcgttgttgtcctgacatcctcattaagaaagtttattctgcttaaaacttataatccacaccctgagcaaacgctccttatgacagagtattaaaataagccgataaagatacacacctttaccgactatttaaaatacacttcaccaattcattttaatttaatggattgaagtaactaaattaatattatgctgttcaattaaaagcttcatacaaccctaatctatttgcactccaccgctaacaccgaacacttgtccagttgtataacttgattcctctgacgctaatagcacataagttccacataactcaacaggttgacctgcacgacctaaaggtgttttttgaccaaatgttgggattttactttgaggttgcccaccagaaatttgtaatggtgaccagaatggaccaggtgctacacagttcactctaattccttttggtcctaattcttctgaaaaacttttagttaatgaaataattgctgcttttgaagcggcataatcatgaagaataggactaggattataaccttgtacagatgatgtcgttgtaattgacgcacccggttttaaatattccaatgctttttgaactgtccaaaatagcggatagacattcgtttcaaatgtttctgtaaatgcctcagttgtaaatccatgaatatcatcatgatactgttgatgtccagcaactaaagtaacattatctaagccacctaattgttgatatgcttgttcaacaaggtcatagttgaactgctcatctcttatatcaccaggaattaacactgccttttgaccactttcttcaattacttggcgtacttcttgtgcatcttgttcttcactcggaagatagttaatcgctacatctgcaccttctttagcatacgcaattgctgctgcacgccctattgctgagtcaccacctgtgactaacattttatagccttgtaagcgttgatgaccttggtaagacgtttcgccacaatcaggtgctggcgtcatttcagattgtaaacccggtacctcttgttcttgtttttcatattccgttgttttaaattttgttctaggatcttgagttgccattttttaacatctccttattcgcttaatggttattatttacccaatcttcctaggaacttaatcatgattacactaaaaattactttcttctttataaaaacaagctcgaattactcatgcaatagtctctttacaaattcaacaaaatactcaggtactttttccagaatcctttcatccggtttatattgagggtgatgtaaatcatattcactatgagaaccaattaacgcaaatacacttggaaaatgttgactataacctgaaaaatcttctccaatcgtaagcggctgttccatcatttccaccttatatccaacatgttgggctactgcaattgctttatgcgtcaatgcctcatcattcatcacagcgccaggtaaatgtgtataatttaaattaattttcatattatatgcttgagccaatccgtccgcaatatcttgtaatcgtgtttctacaagctttcgtaccacaggatcaaaactacgcactgtgccttgtacatacgcatgatcagcaatgacattccaagtattaccacatgatatttgtccaattgttactaccgcttcatcaaacgcagatagatttctactaactatggattgaatactattaatcaattgcgccaacacaataactggatcgttgcattgttctggctttgcagcatgaccacccacgcctttaatatgaaactcaaagcgatctactgctgatgtaattgcccctgttttgattgcaaatgtacctaccgaacgcgatgggtcattatgaaaacccaatactgcttgtacatcttttaatgcatctgtttcaataattttaaaagcgccatgtcctagttcttctgctggttgaaaaatgaatttaacacgcccagtaagagtgccctcaatttcttttaattttacagccgtagccaaaatactagccatgtgaatatcatgaccgcacgcatgcataacaccttcattttcagatttaaaatcctgttcaacaagctcttgaatcggtaaagcatcaatgtcagcccgaacagctatacaactcagaccttgtcccacttcagcaaccagcccagtcataagcggtaagtctaatattctaatatgatgttctgttaaaatatctttaattttttgtgtagtcttaaattctttatcggatagttctggaaattgatgaaaataccttctccaggtaacagcttgatcttttaatcccatcggtcattccccttccttaagtcaatgatatgttgtctaccctacgatgatcatctttgactattaaacgatgatttcacaacaatgtactcttgttaattactttcgctaatgatagacagttgtttaataatatcgtaacactgttgtcaaactattctaacttttataattaagaatctatacaaaaacgtgttctcggataaacttgtttttacaaaccacaaaagctctaaacattagtgtaaaccaatgcttagagctttctaattattttatgctttaaaagataatgtgttatctacgatgaccttaccgtctttaataactttttctgcgtgattgataccaaaatgatatggaatatattcatgatttggtgcatcccaaattactaaattagccttatcacttgtgttaattgtacccgcgttaatatctattgctttagcagcgttgaccgtaacagcattccacacttcactaggcgaaagctttaattttaatgctgcaatggccataacaagttgcaagttattcgttacactgctgcctggattataatcagtagctaacgcgatggcaccattattatcaagcatacctctcgcatctgcataatcttctttacctaaatagaacgtcgttgcaggtaagaggacagctacagtatcactatttcgcaacttttcttttcctttatcactagaagctactaagtggtctgctgatattgcttgttcatcaattgctaattccagtccgcctaacggatcaatttcatccgcatgtattttcactttaaaacctgcttctttggctttttgcatataatgttgcgattgttctattgtaaatacacctgtttcacagaaaatatccgcaaagtctgcatattgttttacttccggaagtaacgcaatcatttcttctaaaaatgcctcatttgaacttgcctctttaggtacagcatgaggccctaggaaagtatgtttcatgtctaaatcatatttctcagctaaacgattagacactttcaattgcttcagttcattttctctatctaatccataaccactcttactttcaactgcaagcacgccgtgtttaatcatagtaagcaaatcatgctctgcttttttaaacaagtcatcttcggatgtttctctagtagcattaacggtagataatatgccaccacccatttctaatatttcaaggtaagacttaccttgacgttttaatgacatctcatgttctcgagatccaccaaatgttaaatgggtatgagcatctactaatgccggagaaactacttttccactagcatctatcgtctcagtcgcatcatagtcatctgtatgttgtccagcatatacaattttgccatctttaatgacaactgtaccatttttcacaacatttaattcatctaattccttacccttcaaaggtttatctgttgatttcggtaaaattaattctgctatgtgattaattattaaatcattcattatttatcacctgctttatcaatcattggaatatgaatacctttttctttagctgtttgaatagcgatgtcatagccagcatcaacatgtcgggcaacacccatacctggatcagtcgtcaatacacgttccaatcttctttcagcacgctctgatccatctgctacaacaaccatacccgcatgaagtgaatatcccatgccaacaccgccaccgtgatggaatgaaatccatgaaccacctgcagctgtgttaatgagtgcattcaatacagcccaatcaccaaccgcgtcactgccatctttcatactttctgtttcacggttaggactagcaactgaaccagcatctaaatggtctcgtccaataacaattggtgctgaaatttcaccgtcacgtacaagacgatttaaagctaagcccattttcgctctttctccatagcctaaccaagcaatacgtgatggtagtccttgatatgaaattttttcttcagctaaatcaagccatcttaataacttttcattttctgggaaaagtttgcgcatttcttcatccgcacgctcgatatcttttggatcaccactcaacgcagcaaagcggaatggccctttaccttcacagaataatggtctaatgtaagctggtacaaagcctgggaagtcaaaagcatttttcactccgttattgaaggctacttgacgaatattgttaccataatcaaatgctacagcgccacgtttttggaattcaagcattaattcaacatgctttgccattgaagcttgtgacagttcaacatattttttcggatctttttcacgcaatactttcgcttcttctacagagtatccttgtggcacatatccatttagcggatcatgtgcacttgtttggtcagtaataatgtcaattttaaatcctttttctagaatcgcttgatggatgtctacagcatttccaactaacccgattgataatccttctccacgttctttcgcctcttctgctaattttaatgcttcatctaaatcagctgttttaacatcacagtatttcgtatcaattcgcttatcaacacgtgtttcatcaacatccacgcaaattgctaccccatgattcatagtaattgctaacggttgcgcaccacccataccacctaaacctgctgtcagtgtaacagtgcctgctaaatctccattaaagtgttgattacctagctcggcaaatgtctcataagtaccttgcacaataccttgagaaccaatatatatccaactaccggctgtcatctgtccatacatgattaaaccttttttatctaattcattaaaatgatcccagtttgcccattcaggcactaatactgaatttgaaattaatacacgtggcgcttcttcatgtgttttaaatacagcaactggctttcctgattgtactaacattgtctcatctgattctaattctcgtaacgttttctctattgcttcaaaagcttcccaattacgtgctgcttttccaataccaccataaacaactaaatcttctggtctttcagcaacttctgggtctaaattgttgtataacattctaagtactgcttcttgttcccaacctttacactcaatactcaaacctttttttgcttgaatttttctcataaaattcgctcctgttcttttaagaagttaattccactaaatttaaaacgcttacattattatcttcaatattcattatagtatgttaaaatatagccaacaaatataaataaactaattatccatagcttgaacctataaataaaaggagcaaaacacatgaaaattattcagttagaatacttcttggctatcgtgaaatataatagttttactaaagctgcacaatttttacatattagccagccatctttaactgctacgattaaaaaaatggaagcagatttaggttatgacttatttacacgttcaacaaaagacatcaagattaccgaaaaaggaatacagttttatcgttatgcgagcgaattagttcaacaatatcgatccacgatggaaaaaatgtatgatttaagcgttacatcagaaccaaggataaaaattgggactcttgaatctacgaatcaatggattgcgaatttaattcgaaagcaccattccgactaccctgaacagcaatatcgtttatatgaaatacatgacaaacatcaatctatagagcaattactgaattttaatattcatttagctataacaaatgaaaaaataacccacgaagatataagatccattcctttatatgaggaatcttacattttattagcacccaaggaaacatttaaaaatcaaaattgggtagatgttgaaaatttgccactcatattaccaaacaaaaattctcaagtgcgcaaacacttagatgactattttaatagaagaaatattcgtccaaatgtcgttgtagaaacagatcgattcgaatcagcagttggatttgttcatctcggcttaggttacgctatcattccgagattttattaccaatcatttcacacgtctaatttagaatataaaaaaattcgtccaaacttaggccgaaaaatttatatcaattaccataaaaaacgcaaacactccgaacaagtacatacattcgtacaacaatgccaagattatttatatggacttttagaggctctttaacttaagttattagagcctcttatgcagttgcgtagtcaactgtatacctttttcctttaacttaagttattagagcctcttatgcagttgctcagtcaactgtatacctttttcctttaacttaagttattagagcctcttatgcagttgctcagatcatcgtataaaaattaatgacgtcatttcaaaaatcgatacaaaaataatttattataaaaattctaagaaagaagtgaagcagatgttaaaatctattaatcatatatgcttttcagtcagaaatttaaacgattcaatacatttttatagagatattttacttgggaaattgctattgactggtaaaaaaactgcttattttgagcttgcaggcctatggattgctttaaatgaagaaaaagatataccacgtaatgaaattcacttttcatatacacatatagctttcactatagatgacagcgaatttaaatattggcatcagaggttaaaagataataacgtgaatattttagaaggaagagttagagatattagagatagacaatcaatttactttactgaccctgatggtcataagctagaattacatactggcacacttgagaacagattaaattattataaagaggctaaaccacatatgacattttacaaataaggcgtcattataaaaaggcctcttgaaatccgttaaaattttaattaattattatataataagagaacttttcaaacaatacagttgttatttttgctatttcaacaaacataaataagcagtaagatgactacaacttaagagtcttcttactgcaattatttttcaaatatatcaacgttaatataacttctattaagaaatactcacattctgccctgcaatgcaaatctcgtcacatataaatatttttaattattttaaaaaatgatgcactaaattagcaacgagcttagcagttctattgtcagcgtcatatgttggattcatctcagcaatactaactgaagacaccttatcacttggaataatacgttttgctaattcaagaacagtatgtggatacaaacctaacactgccggcgcacttaccccaggcgcaaacgcactatcaatgacatccatacaaatcgtaaacataatgacatcatgttcatgtacaaaacgttcaatcatatctttaattgttggtgatacgtgactcaataattcatctgcaaagacataatcaatctttttctctttagcataatcaaataaactttgcgtattaccaccttgagcaataccaagcactaaataatctgtgttttcatcttcttctaaaatttgtctaaagctcgttccagatgtagattgttgttcagcacgtgtatcaaaatgcgcatcaatatttatcacaccaatagattgtgttggatagactttacgtgttgctaaatattgagcatacgcaatatcatgtccaccacctaataaaaatgtttgtctatgattagcaattgacttcgctgcaagcatagcaaattctttttgagtatcaattaattcctcatgatcatgataaacatttccgtaatcgactaaagtttcacattgattcaaatccggcaaacctgcaaatgcttgtttaatcgcatctggtccttcttttgcaccaatgcgccccttgtttaaagcaacacctttgtcaacagcatagcctaatataccgacccctgatggcatactactcttttccagcttagacaaatcttcaaatgttactgtttgaaaatgtctaaattttttcgggtctgtttcactatctaaccttccagtccataaatttggttcaccttgcttgtacacagcatttccccctcttatttatgtggcttattaacaattaaagtataacgtataggaaattttgaattcaattcatagttaaatccgtatcttaaaaatacttatctacattacttttacccctattttctatgtaataacgaatacttagctgatttatgttaataaaatacgtcaagactattacattttcattaatattgacatagacaatttatctctcggcttgtaatatgtataattgttactaaaagatattttgcttgttacctaatggaggttacatataatgaagaacaataaaatttctggttttcaatgggcaatgacgattttcgtcttctttgtcattacaatggcgttatccattatgctcagagatttccagtctataattggtgtcaaacactttatatttgaagttacagatctagcaccattaattgctgcaatcatttgtatactcgttttcaaatataaaaaggtccaacttgcaggtttaaaattctcaatcagcctgaaagtaattgaacgtctattgctagctttaattttacctttaattattctaattattggtatgtacagctttaatacatttgcagatagctttattttattacaatcaacaggcttatcagtacctattacacacattctgattggacatattctgatggcgttcgtagtagaattcggattccgttcatacttacaaaatattgttgaaacgaaaatgaacacgttctttgcaagtattgttgttggtttgatgtattcagttttctcagcaaatacaacttatggtacagaatttgctgcttataacttcctttatacattctcattctctatgattcttggtgaattaattagagcgactaaaggacgtacaatttatattgcaacgacattccatgcttcaatgacattcggacttattttcttgtttagcgaagaaatcggcgatctattttcaatcaaagtcatcgccatttcaacagcaatcgttgcagtaggatacattggtttaagcttaattatccgaggtattgcatatttaacaacaagacgaaaccttgaagaacttgagcctaataattatttagaccatgtcaatgacgatgaagaaactaatcatactgaggctgaaaaatcttcttcaaatattaaagatgctgaaaaaacaggtgtagctactgcatcaacggttggtgttgctaaaaatgatactgaaaatacagtggctgacgaaccaagcattcatgaaggtactgaaaaaacagaacctcaacatcacataggtaatcaaactgaatctaatcatgatgaagatcatgacatcacttcggagtcagtagaatcagcagaatcagttaaacaagcaccacaaagtgacgatttaacaaacgattcaaatgaagatgaaatagagcaatcattaaaagaacctgcgacttataaagaagacagacgttcatcagttgtaattgatgcagaaaaacatatcgaaaaaactgaagaacaatcttcagataaaaacaaataataacaaagcgcttgctagtacctcttaaaaagatgatgctagcaagcgcttttctatactatatattatttttctaaaattttaacaccctcttgagtgcctacaataacttgatctgccatatctaagaagtatcctgtctcaaacacacctgtcagatgaattaaatactcatggaacttatatgggtcaattccttttggtaacttacaatctaaaatataattgccattatcagttataaatgcgacatcttcgtttacacgacgttctacttttatatcagcgtatgattcaattttacgtaatatgtgataccagttaaatttatccacctctactggtaacttaaacgtctcacctaagtattgaactattttcgtttcatcgacaaccacaacaaaacgcgatgccatttcatctataactttctctctgaacagcgcaccaccgccacctttaattatatttaaagatggatctacttcatcagcaccatcaattgctaagtcgatatgatcaacatcattgatttcacatattttaatacctaattcttttgctaaaaatgcaattttattagaagtgcatacacctgtaatattgtaaccacgttctttaattagttgcgccatttgaggtaagagtaattccattgtacttcctgtaccaattcccagcgtcatgtcaccattgatttgacttaaaacatcatttaatgtcattaacttgagtgctttgacatctttcatgaaggtagcctcccatatttatgtaatctattcaattcatattttacatgactcgtataaattaacatacccttatttctaacatttttttaaacatatcaatcagaatttacaattctaaaaatgttttatagtacaatatattttaaataatactcgttaaggagaatgatatgatatcaattcacgcaatttcgacaggaaaaatccaagatttgccttatagctcgaaaagaccgatacgctctgctttagataaaactaagatttcacaaacaacatggttatcttcaactggtttcactggtgatgaacaggcttataaagatcatggtggaccacataaagcagtttgtgggtttagtaagcataattatgcactgtatcaagatgatttacctacactacctactcatgcgatgtttggagagaatttaacatttgattatttagacgaatctgatgtttactttggtaatcaatatcgtttaggtgaagcgttaattgaggtttctgaaattagagaaccatgctggaaaattcaagcaaaatataatattcctgatttagtgaagcgcatgtctacatctggtaaaacaggtttctatttccgggtattaaaacaaggctatgtatctccaaatgatcagctttacttaatacaagaagcaccaatcgaacatcgtttatctgtacaacagcttaatgacctttattataatgatagacaaaatcaagatatgttacgatatgcactaaacaatccatttctgtcaccaacaagacgcgataaacttcaaaaaatgtataacagaacattgaaataattacctttcattataagtgttaaatgaacttttcaaaacaaaaaggaatcaacttacacatcgtttgtataatagtcttatctataaccactgatgctattgattccttttttatgttatatattttctttatttcaaactgtatattaatgatgtcacttcatttgatacgattcttgataacctattcaaaattccgccaaataacataaatattatataaatgccgatacttttaatcattttctactttttcttcgatacggaaacttgttttcgaattgaacacttcaccagcttttaaaattgacggtgctttttcaccatataaattaatatcatttggtaaaaattgtgtttctaatgtaaagccagaatgtggtttataaatattaaatggactatcccactcatcaggctggttaaaagtaaagaacacaacatgaggcatatctgtatcgacctctaacataaattcatgattttcaacatacattttatgttcaccaactgtaaatgggtgatcgagaccaccaaaacgtgtcatttgttggcttaattgcgcatgttgtgatgtaaaaatatcactcaattttatcttgttatcttcaaacacttcatgtaaatctagaatatcacctgtaacaatatttcgctcatctaatacatacatatctaattgattacttgaaatgcgatgattatcaacgacattattatctcgattcaaattgaagtacacatgattcataggactaaacaatgtgtcttctgatgcaactgcttcgtattcaatcgaccattggtgatccgcatcataaatatgtgtaatcgtcacatcgatatcacccgggaaatgatcatcagctgatttcaacaccgtcttaaatataactttaatttgagcaatttcatttctaatttcataatcaaataacttattgtccaaaccatgacatccaccatgtaaatgatgttcaccgttgtttttttctaactgatattctttacctttcaacttaaatttagcattatcaattctaccgctatatcttcctatagaagcaccaaatttaaaaggattactatgataaaactcatccgcttcaacaacatttccaagaacaatattattatcatgatatttccaagacactactcttgctccataattcgtaaaaataattttagtttcatcattatcaattttgattaaatctacaccttgtctttggtgctcaacttcaactatcatttttacttctcccttctaaccacaagtgttcaagctctgctgggtagcaacattactaaaacacctacaatacaaatgattgcaccgataacatcatatttatctggcatttgtttatctacgaccatcgcaaaaatcaaactcatgatgataaatacgccaccatatgctgcatatactcttccgaatgatggaaatgattgaaatgtcgcaatgacaccatataacatgagtatcgcaccgcctattagcccaacaagtgaagactgtccttccctaagccacagccaaatcaggtatcccccacctatttcacataagccagctaatataaatataaaaatcggatataacatgaaatcactccatcacacatttgctatcaataatctatcggctacatatcatttgtttacatttcttcttacttcacattcccattttaaaaagttcgttttcacattcatattgtacacttttttagacattattctatagctaaatataaaaaaataagagtaacacgctttcatcatcattttatatgataaatgtgtgtcactctcatcaattttattttttaaatacacgtttcattgaattaaataagccacgttcaaatgtaagtactgaatctttatatgttttaattgcaatccatatcaagacagctaccattacaattgagattaaagaacttaagatgacctcatatatttgaagccctgaagtttgagcgcgtacaactaattgaaatggcgctaaaaacggaatataacttgtgattaaagcaagttgtccatcaggattatttatcgtgaatatcgcgatataaaatgcaatcataccaagtaatgtcagtggcatcaaagattgatttaaatcttctattctagatgttaatgatccgaggatggctgcaagtaatacatacgccataattccaacaatactacttataattccgacaataataatttgccaagacaattgattcatttccacgttaaaaccttgtagcaagtcttttaagtcaaaggcaaaaatgcatataactgccatcaatacaattaaaataatctgagtcacggcaactgctataacgcctaaaattttagcaaaaatatgttggattggtgaaatacttgtaataatcatttcaatgacacgcgatgttttctcactagcaatttccatagctatttgagatgcataatttaaaacaatgaagaacattagaaagataataccataagctaaagcatagttgaaaatcttttgtccttctgatactttatcgacttcatcattagaaatcaccttattatcaactttactttgtgcttgtaatttttgtaagtcttctttgttgatatttaattccccggctaccatatttgtttgaatagctgtaagcagtgcttgtactttttgtgaatcttcatgacttactcgcttctcactaatgattgtcccttgtaacgtgcgattttgattcaccttgataatataagctttatcaagtttatgtttttttacttctttttcagcatcttctatagaaactttagtaaacttagcatcactatggaatgtattcgcctgttgcttgaaaaccttatagatttgttcattcggtgctgctacaccaattttatctggaccatcatcaaacatgttaataatcttatcaatgttagataggccaatcattaaggcagcaataataatcataaaaattacaaatgatttagctttaatttttttgatatatgtcaaagtaaatgtcgcccaaaacttatgcatccttgccaccaaccttctcaatgaatatatcttgtaatgatggttctacaacttggaatcgtttaacataaccttgatgtgccacaacttgataaatatctttggctacgtcttcattctcaatcgtcaactgaagaccttgcttcatgttttcactatgaatgatgcctctaatgtttgttaaatctggtagtgttgtttctgattcaatgacaactttcttgttaccattagatgcacgtacatgattgatatcaccagaaacaacaagttgacctttatctaaaatacaaacatcatcacataattcttcaacatgctccatacggtgagaactataaacgattgtactgccccaatcatttaagtctttaactgcttcttttaataactcaacattaactgggtctagaccactgaaaggctcatctaatattagtaattctggtttatgtaacatacttgctaacagctgaattttttgttgattcccttttgatagactatcaattcgttttttgcggttttcagtaatatcaaaacgctcaagccaatacgatatttgctgttgtatttctgtttttgacattccctttaaagttgccaaatatttcaattcttcttcaactgtcaatttcccatgtaaaccgcgttcttccggtaaataaccaatacgattgtacattgttttatctagttttttaccgttatacgtaatgtgtccttcagttggttcacttaagcctaaaatcatacgaaatgtcgttgttttacctgcaccatttcttcctagaaaacctaacattttgcctgattctaactctaatgaaatatcatttactgccgtcatcttgccaaaacgtttcgtaacatgttcaattacaagtcccatactttgcctcctaaaaaaatatgtatttatcttaatataacatttctattctctataaatgcaatatttttaaagtgaatttatttttaaaatttctgaaattgaaatatttaaatagtatcttctttgcatgttaagtatcattagcgctagatacgcatttcccatacctttattgccttatttgtaaaaaaatatcccagcatcattgtgccgagatatttatatcattacaattgattatctgtttcttccggtgttttcggtgtttcagatgtcactggttgatttttaattgtagacgggtattttgggctttcgccatatttatttgccggcttactgtcaaagcataggaatactatcataacaattgttaggcctaaataaacaaaataaagaagtactaacaaaatattaagacccatcggcattaatgtaaaatcactgtcataataactatcgataatctgtaatactatataaaatataatactgaatactgtcataatcattggaaataacattgttcttgatatatcgtgaaatcttcgaacgcacaacgctaaatttggaataaacgttgccaaactatagacaaaagtatacacagatgtaaggataatcatcaatatactcataactattaatgtttcgttatctgccgctatagaaataaagactagaaataggtttattattagcacacacacagctggaaccataagtatcaaatgccatagtgccatataccaatattcactacgtcttgatctccccttaaaatttacataatttttccaaaataatacgaatgatttcataaaacctacttgaggtaattgttccattgtaatctccctttcgttaatcatatttatatttttaattattgttaccgttataatttacaagattcattatcaagccacttcatttcaatcgtcattcactttggaaaatggactttatatttcatcactagtaaaatgaaaacccgctacaagtacacatctatatggagactcatttgaaagtcaacgcttcgttaactatactaaaaatatgtcatactgcaatgttcacgtttaaaagagtctcaatctctgcaaataaaatattccataacaaagtatatactttacatttttataattcttaacaatactattttatcaaatatttaccacaataaaaatatctttttcatttttatttaatttaatcatataattgcgaggagaatattatggatttcgttaataatgatacaagacaaattgctaaaaacttattaggtgtcaaagtgatttatcaggataccactcaaacgtatacaggctacatcgtggaaacggaagcttacttaggtttgaatgatcgtgcggctcatggctatggcggtaaaataacacctaaagtcacgtcattatataaacgtggtggtacaatttatgcacatgtcatgcatacgcatttactcattaattttgtaacaaaatctgaaggtatacctgaaggcgtacttatacgcgcaattgaaccagaagaaggtttatccgctatgttccgtaacagaggtaagaaaggctacgaggtaacgaatggcccaggaaaatggactaaggcatttaacattccacgggctatcgatggcgctacgttaaatgactgtagattgtctattgatactaagaatcgtaaatatcctaaagatattattgctagtccacgaatcggtattccaaataaaggtgattggacacataaatctttacgttacacagtgaaaggtaatccatttgtgtctcgcatgcgtaaatcagattgtatgtttcccgaagatacttggaaataaatgccatctttcattgattactatcatgaaaatgaaatctatctccttataagtcaatcaatcgtgccgccaacatgcggatgggttgattgtttttttgtccatcatattttttgattcatctcctctttttgaacttgttcttaattataaaatataacaatagaattatttataattattaaatttagatgcattaatattattgatattattttcaaaaactagaaatattgatttgttgcatgtataatgttaaaagtgcccttttataacgcttacatataaaagcttatttagggagagggatattcaacaagggggatttgaaaatgatagaacttaatgcaattacaacattatgtttagcctgtatactttacttacttggtacagctatcgttaatcacgttaattttttgaaacgcatttgtataccagcaccagtgattggcggcttaatctttgctattttagttgcggctttggattcatttggcatggttaagattaaattagatgcttcattcattcaagatttcttcatgttagcattctttacgacaatcggtcttggtgcatcattgaaattatttaaattaggtggcaaagtcttgctattatactttatgttttgtgctatcatttcagtcattcaaaacatagttggtgtatcactagcaaaagtattaaatattaaaccgttactaggattaacagcaggttccatgtctatggaaggcggtcatggtaatgctgctgcttatggtaagacaattcaagatttaggtattgattcggcactgacagcggctcttgcagctgcaactttaggtcttgtatttggagggcttatcggtggtccagttgtaaaatatttaatcaaacgttataacttaaagcctcaacatagtgacgatacatttaaagattatagccaagtagcatataacgaacatttacatagtaaatttaatgccactgaagtattcttcattcaatttacaatcgttgtattctgtatggcagttggaagttatttcagtcatttgtttacagctcaaacagggattaatgttccaatttacgttggctcattatttgtagctgttatcgtccgaaatatctctgaaagttttaattttaatattgtagatttaaaaattactaatcaaattggcgatgtcgcattaggtattttcttatctcttgcgctaatgagcattcaattaatcgaaatttataaacttgctatacctcttattattatcgttttagttcaagttgtcgttatgattttatttgctgttttaattttatttagaggtttaggaaaagattatgatgctgcagtaatggtaggtggttttatcgggcatgggcttggtgcaacgccaaatgccatggcaaatttagatgttattactaaaaaatatggaaactcacctaaagcatatttagttgtacctattgttggtgcattcttaatcgatttaattggtgttatagtcattatgggattcattcaatggtttagttaaacaccaaactcataaataaaagaggaggcctccgcctcctcttttatttatcctcgatgtatattcaagctacgttgttctatccatgacattatttccggactaaatacgatttgtttttgtgttaagtcgtcaatatttttagcatctaacatcgtcattattgatttcatgtgttcaataaatgattctacataagctactgtatgtgcaatgccattattttcaacttgatttaaaaacggacgtgacataccagttgcctttgcaccaagtgctaaacttttaattgcatcgagtggtgtacgtaaaccaccactcgcgaaaactgaaatttcgctttgataagccgttgtttcaagtaatgactcaactgtagactgtccccatgatgataagtaatccatatctttatttgcacgacgttcattttcaatatctacaaagttagtaccacctttgccactaacatcgacatacttgacgcctatttgttgtaagtcatgcattaattctttgctcataccaaatccaacttcttttataatgactggaacagacactcgtgatacaatcgacgctatattatctaaccaagtcacaaattcacgattcccttcaggcataactaattcttgaggagaattaacatggatttgtaacgcttgtgcctcaagtaattcaactgcttccaaagccttttctactggtacgtccgcaccaacattgctaaaaatcatgccttcaggattcatttttcgcgcaatcgtaaacgtctcagccatgcgtggatttctcaatgccgcatgtgttgatccaactgccatcgctaagccagtttctcttgcaactacagctagcttttcattgatgtttttcgtccactcgctaccacccgtcattgcattaatataaatcggatatgccatcgttaagtcaggcgtctgtgatgtcaaatcgatatcatttacattaattgatgggatagaatgatgcacaaaacgcatcttatcaaaatctgaatgcattgcgtcagattgggccattgctatttcaacatgttcattttttctctgttctctttgaaaatcactcatgattaaacctaccttttcgtcatttctaatttaaaaccattttttacgtctgaaaaagatgattaatacgacagctataacaaacattacagctaagcaaatataatatccataatgtaaatgtaatgccggcatatttacaaagttcataccataaatcccagctatgaatgttaacggtgaaaatataactgatactaacgttaatacttgcataatactattcattctaaatgacgtgtatgactcaaaattttctcgtatttcgtttgtcatttcttgagcagtacgaatgatattacgttgcttaatcaagtggtcatcgatatgttgaatgtatagcgaatgtttattatctataatcaaatcaccattttgtttcattgtatcaattagctcttgcataggaaacagtacacgttttactttaatcaaatccgaacgtaacttaaagacactatccatgaccattttattaaagcgatcatctacatggcggtcttcaaaatgataaacactatcttcaagtgcatatacaaagttgaaatatttatcaaccatcatatctaaaattaatatgacgacatctgcacaatctaattctgcatctaatgtattcatatacttatagactactttatttaatgattccaacgtttgatgatgatatgttactaatacattgtcttgtataaaaatatttagtgctattggtgaatagtttgaccccataatactatgaaatactaagtattgataatctttataagatttatatttagctcgtggcataccgttaattgcatcatccacttctaaatcattaaaattaaaatgtgctttaaaccattcattttcttgttcattcggttcatcaaaatcataccaaacaatagtcgcatcttttggtatctctttgatatcatcaactactttaaacggttcatatgtagtttgataccgtatctttaaagccatcgatactccccctaaataacgaattctctattattttatcatgaattaaataacgtgtatgtcttaatttattttagtatgatagtcactaaggagatggttattatcaaacaactttttacacatactcaaaccgtaacatctgaattcattgaccataacaatcatatgcatgatgcaaattataatatcatttttagtgacgtcgtgaatcgttttaattacagccacggtctttctttaaaagaacgcgaaaatttagcatatacactatttacactagaagaacatacgacatacctctcagaattgtctcttggcgatgtatttactgttactttatatatttatgattacgattataagcggttgcatttatttttaacattaactaaagaagatggtacactagcatcaacaaatgaagtaatgatgatgggaattaatcagcacacacgtcgttctgatgcttttcctgaatcattctcaacacaaatagcacactattataaaaatcaaccaactatcacttggcctgaacaattaggacataaaatagcaattccacacaaaggagcattaaaatgacagatgcattacaacaaaagattcatattgaattactagatttattagatgatgttaagtttgaattaacagaattaaatgcacaaaaagggttatacattaacggaccagcaaatcagctacttaagcgtggcgttcatatggcttatgttcaaggacaaaagcaagccatcgataatattatgactattgtggaacagcagcttgaagatcaacatttcctagaagattatgataaatttcaaaatgaggttactcatcgcaattatgataaaacagctaactttgcagaacttagtgatattccacgtcaattcgataattttttagatcaattttatcaaattaaagggcaatactttatcatcacacatatcaatacacttattggtgattttcactcagaagctcattaacaattagtctatataacccttgctatattttcaaaaacaaaacccaattacgttttcatgtcaaatatcatcttgcatgaaatcgtaactgggtcaattgtatgttattagttattttgtgttacatcctcatctatcgatttggcaatttgtttaatagctttatgtgattgtctaattggataaattggaaaatcatgtaccatcttaggataatcataaaactcaatgtattgatgatgttgcaacatcatttgttcgaatagcttcatatcaggatgtgtcatttcacgtccaccaccaaacatataaactggtggcaatccttctattgtgccattaattggcgatatgcgcttatctgttaatggtaggccattcgcccattttttcataatctcattgacaccaaactgacttagaaccgcatcttgttcgattaaggcgtccgaaatatctttattagatagtgttgcatctaaaattggtgagattaaatacaatttattcggtaatggctgttgattatctaaaagagattgtacaaaggataatgccagtgcaccacctgaaccatcacccatgactacgacattttgatgtcctacttcagatactaattgatcataaacacgttgtatcgcttggaaagtatcgtcaatatgaaactctggtgtctttggatagataggcagtacaacctcatataatgtacttaaagtgattttatccaacaatctccaatggaacggtgatggttgtagtgcattgaatccaccgtgaatatataaaattttcttatcaatttgatgtctgaaattaaagcgaaagacttgcatatcatctaatgataatttttctaaatttgctttaacatttaatgttgaaggctgcttatgtttttttctattttcaatttctcttttataaaaaaatctttcaacatcttgatcatttttaaacataatcgagcgattgtgaagcaaatatttattgacaacgctattcataacacggtttctaatcaatgtcttaacctacctttatatattttatgtatccaatgattgtctatcccctacattctttgccaaaaaaagtatataatgtagaagatattttctttttcactttcaaatttaagactacaattgaacagtgatttttcatcattataacagacaactagacatattgataagtaaagaaaagaactttatacggaggtgccttgcatgacaaatccaaatcaacgattagaaccatttgatgagacatttcaacaaccgaatattcatcgtggtaagcgatatggtaagaaaaaacgttcattggtaagcatgattattcaaatcattgttgttatattaaccgcaatcgctggatacagcatgtggaaacaacccatttttaatattgtcttcaccaaagaatctgtagattttgatggcattaaaaattttaacgagacaattggaaaaatgcatcaattaaatattaatttgggtaatatcaatgatttacaacaaggaatcgatcgcttaattttagtctttaacggtttctttattctatgtatcgttagcctagtcataacaatactgacaattgtatttaatcgcacagttctaaaagtagtaaatattttagtgttaacaattatgttagtcattactttgtatttcagttatattattaaaacactcgcacaagaaattgcagatgctttaaaaaaatattatttaaatgtaccaccagatcaagtgattacagaagctgacgctattcataacggcatcattttactgggctgtagcatcggtttacttgttataagcttattcttccgtaatcgcatgcctcgtttaaaataatgttatatagtagggattgggacagaaatgttattttcacaaaattcatttcgttgacccacttcctgctttttctttattaatgacctactacgtcaatgccaaattttaatataattcctcttttattttataaatcaacaaataaaaaaagtatcgataaccatatttggcaccgatactttaaaaatcatgtccccacaacataatttttgattagtcacacttcaattaatttattttatttattcatgattgttatttgagcttgcttctaacttttgagctgtagcttttgcttttttattactttgtaaaaataaacataaaattaaagcgatgatgctaaatatcgttgcaactataaatgcatcattaataccttcaactgttgctagtttatttacaaattgtaataacactttcattgcgccttcttgaccaccatattgcgatgctaattcacgcatatgatcttgtacaacaggattcgttttatctaactcttccccaaaagctgataaatgttgtgttgtttgtgttgtcataacagtaactaagattgctgtacctatagagcctgctaattgacgcatcgtatttaagaaagcattaccatgagaggcaagtcgtcccggtaacgcattaatagctgcagttaccattggcatcattataaatgccataccaaatgaacgaagtacatagatacccatgattgtcatatatggtgtatccatatttaatttagttaattcccatgttgcataagtcatgacagcaataccaaagatagctaatggttttaaaccaatagtatctaacaatttacctgcaaatggtccaagtagacccataattagagaaccaggtaataataacaatccggaatctaatgctgagaatccgcgtaaattttgtaaataaatcggtaataaaatcataccaccatataaacttaacattacaaccatattaataattgttgttaatgtaaatgttgggaattttaatacttctaaattcaacattggtgatttcattcttaattctcttattacaaatagaataataaagataataccaatcgcaaacattgtttctatctcaacagaaccccatcctttgttccccgcttctgaaaagccgtataacaaagcaccaaaaccaatcgtactaaaaatgatacctgggatatcagctttagggtttgttgtatattgatataacttaaaccatacaaaaccaactaagattgcaataataccgataatgaacataccgtaaaacatcacattccaatggtaattttgtacaatataacctgataatgttggaccaattgcaggtgctaaaatcattgcgatacccattgtacccatggcagcaccacgtttttcaggtggataaattgtaataataacaattgaacctaatggcattagtacacctgcaccaatggcttgtaatacacgtccaaccatcatgattgggaaattcattgaaatcgcacagattaatgaaccaattgtaaagagtactaacgcaactaaaaataattttcgatatgaatatttattaaatagatacgccgtaattggtattaaaataccgtttactaacatgaatcccgtcatcaaccattgccctgttgacgcagaaatattaaattccgtattaatttttggcaaagcaacatttaataatgtttggtttaaaatcgcaataaacataccgaataataatgccgctaatattttaccgcgtgaaacaccttcaccaaaaataaagtttttatgttctttttttattttttcattcactttatattcttctgattcaggatttttagcagcaactgcttcctcaccattattattagtgaatgcttcttgatctttctcagacccctttgtgtaaccatttagactaacttggctatgatcatcttgattgtcaacacgcaactcttcatgcgtcatacgttgtgtcgattgatcagttgttttgtctaaatcactagctttaaatttagattgatttgattgacgtgtcgtaaattgttgttccttttgttggcgtttgcctttttttcttgatcttattaaaaataaattgataaccccaacaataatgagcgctaaaataatgtagctaataatgaaggtcgtagtcatttaatgacccccttaatttttatggatttttacttcagcgttcattccaggaacaacttgtttagacggttctgattctagagtgattttaacaggtattacttgagaaactttagtgtagttaccatcactatttgatgatggcattaatgaaaagcttgcagcagttgcttttccaatactatcaactttacctttaatagaagctttttgaccgtcaatagtcacatcaacatctttacctacttcaacatctttaatatctttttcgtcaatatttgctgttacatataaatcatctaaattgtatgcataagcgattgggttaccagcttgcaccattgaaccttccataccatctaatttggcaattgtacctttttgaggcattttaagatccatatctttcgtttcgccatcttgaccttgtacagtaacagttgctactttgtcacctttatcgagtttgtcaccttgtttaacattaagtgatttaatttgtccagatgcaggacttgctattttaatttgatcgccatttacttttgcattatcagttgttacatagcttgttgttttattccagaaataaaagccagcaatcccaattgctaacagtacaacaaccgtaatgacattaattaatatcatctttttcatgaaacatttcctcctatttgcttttaaaattcactttatttattatagagacatgataactaaaaaaacaccaacaatttttataagagtgttggttaaaattcacaaaggtgtaacaatatgaaacgacaagccaaaatagaaattcaaaacgcacttgttgatttgatggctgaatatccttttcaagaaatatccactaaaatgatttgcgcgtattgtaatattaatcgttctactttttatgattattacaaagataaatttgatttattggataccatcaactcaaagcataaagaaaaattccaatttcttctaagcgcgctacatcataatttcgaaaatattaaacaggataagcttaaactttataaattcttcattattattgctaagtatatcaagcacaatgagcagtttttcaaagacattttagttacctatccaatgaaaacattattcatagactatataaatttagcgagagattactatcaacaaattatgaatgactatagtactacagtaaccaataaacagctttatgttacatatatcataggcggtcaagctggggtgtttattaattggctttcgaatggttgtaatgaatcacctgaagaagttgctgacattttattggctaatacgattaaacttcaaatccaataatacggtttcattctaataaagaaatgctataaaacaactagataaagttaaaccaaatggatagataatagtacatatgttacggtgctatcaatataaaaatgccgagatttccacataataatctcggcatttttatttttgatgctaaattcataggtctatgaatagctcaagttttgttttttaatttttcaattcaatataatagaagaaactatgtttatcatcgatttgttttaaataccttcatattataaatctgtaaaataattaatataactgctgtagctataataataattatgtaaggtataggattatcttcaccttttacccccactaatggcgatgcaacaccaccaaataaaaactgcactaaacctaataaacttgatgaactccctctaccactactactttcatccatagctattgtaaaaccaagtgtcgcaacacctgtcactggtgctattaaaatgataaatcctatcgctaaaatccaaaagttccaatgattaagcaatacaatcgtcactaaaattacaccgataatctgaatcatcgtcatgcctctcatcaatttttgtgagtctataaaatcaacaaggtacccagtaagttgacttgatataatgagcgtaataccaattcctgcaaacatccaactaaattgtattgcagtcatgccataaattttttgaataataaacggagacgcagaaatataagtaaataatattacaaatgtcataccttgaatgagcattggtaatacaaaacgtggcgtcttcaataatattttgaagtttttaaacattgtttttaatccactacttgactcacgatttgtcactgttaatgattcaggtacttttaataaagaacctatgaccatgacgaaaccaaagatagtcagaatgacaaagaccatacgccagacagaataatttaaaattatgccccctattgttggcgcaacaactggtgcaataccattaacaagcatcaataatgccataaacttagttagttcattaccactatacatatcacttgctatagctcttgaaataactgctgctgcgccacctgtcactccttgaagaaatcttaatgcaaccatcagccaaatattatgtacaaaaacaatacctaaacttgctaatgtaaaaataatcatagctataataagcggctttctgcgcccagttgaatctgaaattggaccagcaaacaaattaccaaacgctaaaccaatcataaacatcgataatgttaattgtgcgttagacgtcgttgtttgaaaatcatgtctaatatctggtaatccaggcaaaaacatatctatcgataatgctccaatggccgtcaaagatcctaaaataataataaatatcggtgaacgcttgttaaaatgcgttaaatcattcatatgactatctcctttatataatgattagtttataactatcacgaacagaaactaaatttaaatatgctcttttatatattagcattactcacaagtttcatgaacatcattacaacttataaaaggtataaaatgatataaacctcagcactccataaattttttcacaaaaaacaatcccttcaaagtaattcacactaattgtaaatactttgaaaggatgttgtttgtattccatgacacatgcatcttatttaagttttatactctatttttctgatgtcttgattaattgcaagcggtcttgcgagccttgttcaagctcatattctttatctacttgcttaccgttttcatttattaatcttacggttgcggtaatcttatcaccatgtttttcagcatctataatttgtggtgaactaatcatcattaaacttcctttagatacacgcttctttacatcatcataaaaagatgatcctttttttatatatgacgatacaaaatcaaaatctgactgattaaacgcagcattattcgctaaagaatatccagcaaagaattctatcaatttgttcttcaagctgttttcttctttttctttcttttcaacatagtcttcgatatcttcactgtcaaaattcaaagttatctctgtattgtattttaaatcgctggctttaatcgtcttcgtctgtgttgtaaatgttttacctttcgctttacctgaagctgaaatggtaatatctttattttgtggatatggaccatacgttttggaacttgaaaatgccatttcacggtcatttatagttacttttttagaactatcatttaattttgtatcgccttttaaagttacagttatatttgcttcttcaaaatcttcagtaacatctaccgtttcagaattactttgtctaaaatcaaattttaaatagcctgcaaaatcaccgttctcagttgatttcatagctggaattctatatgtccccggtataaaattacctattggcgtcactttatttgcttcagctataaccatctttttcttaccaccagatttaaactcatattttgttttttctttcggcttaacaattggttgcttggtaggtgcagtaaagctcatattatcgaaaaagatataacgcgtgccatttttacttacacgtaatatattttgaccagatctggtttgaatataagaagctacgctggtcttactcttattcaatttatgtaccgtatttttaaggtcgctgacaaattgcttaagcccaacttcatctttgatatagttaatgtatactttcgcttcttcagaatctactttattatctttagtacttaataatgttgctactttttgtttatcattattctcaatcgcattcactaatattttagtttgcgcttcaggtgaattgaagtttcttagtaaaaagaacaatataataattaagattaaaatgaaaaaaccaattgcccaaggcaccatttttctcatcttgatgttattagtttgtatatcttcatcggttgactttctatataatgcttgacgactatcaaatttatgtccacattgtgtacatatctgtacatcatcttgtgcttgttgtccgcacttcgggcaagatttcatactttcacctcaattctgttcctcttcaattgttatatgtatatcacaaaaattatttcattattttaccattattattttacaaatattatcccaagaatacaattcaagaaatgattaactttactttagaattgtaccttattacattatttatgaaagtactctctcaattataactaaaaagaaggtgttcaatacatacatatttagtcttatatttgaacaccttcaaaaacctatttatgattgctatatgttttaatgcgatgattgatgacttctaatacttgccttacattttcaatatcttcagaatttaaatcattagtaatatcttgcgcaatatctgtcataatcgcattacgttctttcaaatatgctctacctttgtcagttaaggttatgaatttcaaacgttgatcaatatttaaatttggtttatctaacttaactaatttagcatcgattaactttttaattcgtcggcttactgcggccttatttactccttgtctttgcgtgatttcactaattgtcaaaggttctttatttaacatacctaatacgttagactgctctaatgaaatttcatattcattttgtaaatctttcaacatttttgcagttaatgcgttaacgttatttataaactgctctaaaaattgaatatggtcttgtaaatgttttaccataattatttctccctaattactatttttataaagtatcctcagcaatcattgtatcgcacatctaaaaaacacaaaaatattgacccatatataatataacaaattaagacttacatgttgctgcgttctccttgctttaataaattaaatcatctacatttatatttaatatttattataagcgaggtgtcagtatgttattgaatttattattaatatttatacttatcgttatttgtccgttaattttcaactatactctgacgttaaatttaacatgctacatcttagttgtcatatcgatatttttgtcactcatctatagcatcatgacctatactttcccttggtctatgtttgtaacatttataataatcagtattatcatgctattcaaacatagatatttattttctcatacttctagtcgcttatttattaaaaaattattatctttttcatataaatttgtactctacacatcagcacttctatttataagtacgattcagtcacctattgtgaaaggtttgtctatgtggttagctatattatgtctttccctgttactaacctttatttgttatctcgtttggacagtatcatatagacatagatcatacaacaaagaagttgatatcataattgtgttaggtgctggtatttttaccgaatttgtcacaccaatgcttgcagcgcgtttagaccgtgcacttgatatctatcaacaacaagcatcagcaacaaagattattgtatctggcggacaaggaccagacgaaccaatttctgaagctttagctatgcaacgttatttgattgcacatggtgttgataaaacagatatactaatggaatctcactctataaatacatacacaaactttttatattctaaacaaatcatcaacaatttgtatcatgaagcagttaaaattgtttgtgtaacaagtcagtttcatgtattgcgcgccttacgactagcccaaaaattaggtttatctatcgatggtgtcggaagtcatacaccatatcactttttcttacatgtgctcattaaagattatctaggcgtaatgtatcagtatagattgttattaacgttatattgttcaagtagttggtttatatgtctttacgccgcttttatttataatagttaatccacaaacaaactattattataggttgtttctaatattgcgtcaaactatctttaaatattcgttaatccttgattagacaattgttatattgaaaataaataaactaaagcacgtcatcattttatataatagtgacgcgcttttttgtaaacccaaatcgtattctgttatctaacttttatactactatgtcttaaatcattaacatttagcgtctttacaagccactaatcagttattttgccatcttctaattcaatcactcgatctgcatattcaaataatcttcgatcgtgtgtaatcataataccaatcatttgttgttctttaatttgttgacgtatcatctcaacaacttttgttgctctatcggcatctaaacttgctgtgggctcatctgctaaaatgattttcggattattcataaatgctctcataatcgcaacacgttgcttttcaccgccagataactgatgcggatatacattcaagcgatcttctaacccaatatttttcaaaagttgtattgctcttgttgaactttgttgtttggtcattcccgcttcttggcctacgagtgtcaattgctctatcacttttaaataaggaactaaatgtgaagattgaaaaataaaaccaatatcttccaatcgcaaatcactaggacgatgctgtttatcaaacaatggtgcatcattgtaaagcactgtaccactcgtttgacttaacaatccgcctaatatcgttagcaatgttgttttcccagaaccagaggcaccatttaaaatgacaaattccccttgttccacttcaaaattaataccttttaaaacttttgtttcagacaaaccttctccgaaatttttgacgatatctttaacgactaatgccattattctgcacctccaattgcttcgataggatccactttaaataatttgataaatgatagtgaggcacctaaaatcgctactaatataaatatccccaccattaataaaatattttgcgttgttaagtaaaaaggcatcgttaccggcatcataaatgatagtcctactatgatgatcacagcaatacctaccccaattattgttagtgttaaaatttgtaaaactaacgcactcaataaatgtcttgtcttaataccaattgctttcaaaatgccaatttgtgatattttttgaatcgtcataacatagaaaaatgcacttagaacgattgctgtaatagcaaacaaactaacaatcatcatatttaacggtgcttgctctgcttgataactcgcaatattacctgttaaatctttttcactcacaacttgaacgtcatttattttattaagctcatcacgttgttgttgtgttaaatttttcactggataaaatgccgtattaaccttattcaatgcattaaatccgttatcgttcaatagcacaatggaactatgcgcatacattgtgtcgtttaaaataccagaaactctataactagttgaattatttttaaaatgtaatctatccccgactctaatgttgtctgcagctaacttatcattaatagcgacctcatgagcatttttaggataatcaccttttttaagttgtatgcgttgttgtttaacgtcattcattgtaatcacatcttgttctttattagataatttcaatgtttgaatattcattttatatggttcttgatgaattacctttttaatttgattctgttgcgtatcactaagttgcgatttctcaatttgcggctctttcattttttgaacaacatattcatcattatcaaagtgttcaaataacgaaatattctccctaccaagcccttgagctaaaccactaataaataacaccataatacttaataaaagaatgattaatgtgattaaaatataacgaaatttgtaaaacataatctcttttatcgctaatttcatatcgattcacttctccctatttcttctttagcgtcagtataaggttgaaatatgaactcaatatgaacaattgtttttttacgcaaaaatattttacatgtataataaatgaaaaagataagggagtttatagctatggtgcaatgtcttgttgtcgatgacgatcctcgaatcctaaattatatagctagccatttacaaacagagcacattgatgcatacacacaaccaagtggtgaagctgcattaaaacttttagaaaaacagcgtgtcgatattgcagtggtagatattatgatggatggtatggacggctttcaattatgtaatacattaaaaaatgattatgatataccagttattatgttaacagcgcgggatgcacttagtgacaaagagcgtgcgtttataagtggtactgacgattatgtaaccaaaccctttgaggttaaggaacttatttttagaattcgtgcggtattacgtcgatataatatcaattcaaattcagaaatgactattggcaacttaacgctaaaccaatcctatttggaactccaagtatctaataaaacgatgacgttaccgaacaaggaatttcaattattatttatgcttgcagcacgtcctaagcaaatctttactcgtgaacaaataatagaaaaaatttggggctatgattatgaaggagatgaacgaacagttgacgttcatattaagcgactacgccaaagattaaaaaaattaaatgccacacttacaattgaaacagtaagaggacaaggctataaggtggagaatcatgtttaaaacactctatgctagaattgcgatttattccattacggttattttatttagtgcattaataagttttgtattaacaaatgtttactatcattataatttaaaagcatctaatgacgcgaaaatcatgaagacacttaaagaagcaagacaatatgaacaatcagctaaaccaacgcacattcaacaatatttcaaacatttagggcaaatgaattaccaaataatgaccgttgatcaaaaaggtcataagacattttatggggagccatttagagaagatactttatcacaaaatgctattaacaacgtattaaataataaagattaccatggtattaaagataaaccattcgcattattcgtaactggatttttcgacaatgtaacagataatactgttggtattaactttaagacaaaagacggttcaatagcagtattcatgcgtccagatattggagaaacatttagcgagtttagaacattcttagccgtcttgttaatgttgttattatttatctcgatttcattagttatcgcatcaacctattcaatcattcgtccagtaaaaaagttaaagctagcgaccgaacgcttaattgatggtgattttgaaacacctatcaaacaaacacgcaaagatgaaattggaacattacagtatcactttaataagatgagagagtcattgggacaagttgatcaaatgaggcagcattttgtacaaaatgtatctcatgaaatcaaaacaccattaacacatattcatcatttattaagcgagttacaacaaacttctgataaaacattaagacaacaatatataaatgatatttataccattacaacgcagctgagcggattaacaactgaattgttactcttatccgaattagataatcaccaacatttattattcgatgataagattcaagtcgatcaactcattaaagatatcattcgacatgaacaatttgctgctgatgaaaagtcgttaatcattttagctgacctagaatcaatcaatttcctaggaaatcaacgtttgttacatcaagcattgagtaatttattaataaatgctattaagtatacagatgttggtggtgccattgacatcgctttgcaacatagtcacaacaatatcattttcacaataagtaatgatggttcaccaattagtccacaagctgaagcacgtttatttgaacgtttttataaagtgagcaaacatgataatagcaatggtttaggtcttgcaattacaaaatccatcattgaattgcatcatggtacaatccaattcacacaaagtaacgagtatgtaaccacctttactattacactgccaaataattcacattaatctctacctcctgaaaaaacatttctgtttttatttcaggaggtatcttttatattgattagcgctttctagccacttaacatttaatttctaccattcaacaaaatttaaatatatcgatggtcatttatggtttaataattttgaaggaggcattaacctatgatgaaactcaatttatttatcaatgcaaatgagacggaatcttatattgatatacatgcacctaaaatgaatgatcacgttcaaagtattattaatgcagtcaatgatttagacaaatcacatacattagtcggatacatagacaaagaaatccatatcattaatgtatcagatgttataacattccaagttattaataaaaatgtaacagccattacaagcaatcaaaaattcaaactaaaattacgactttatgaactagaaaaacagttaccacaacatttcattcgcatttccaaatcagaaatcgtcaacaagtattacattgaaaaattattattagagccaaatggacttatacgtatgtatcttaaagatgcacactacacctattcttctagacgttatttaaaatctataaaggagcgcttatcaatatgaaaaatttgaaaaactcattatttattagcttaatcattggtttgtccctttcactgttctttagtatgttatttgcagacggcaaatattatccactgaacccacaatcaactattggcattttgtattataatcatttcacagaaactaccgtaatgttgatttctatcattttatggttactcataggcgtcgtctttttccttggagattttatctttaaatacacagattggagcattactaaagcaactataatgcatttcataacaacgtatgtcggattcttgcctttagcaatgcttgccggttggtttccactaacagtgcattatctaatcatattcacaattatcttcattgtgatttatgtattaatttggataattcaattctttaaaaacaagaactacgtagacactattaacgagcaactgaaacaattaaaatgatttttattaaccactaaaaaacggtaatgtctatcacattaaaaaagacattaccgtttcgtttattatttaacttgtaaatacttagttacttcttcattaattttgtgatataaatcctcatgatctgttaagcgataaccaaatgacggcaccatttctttaatctttggttcccaccctttgaattcatcacgatagcatcgctgtaaaacatcaaacataatatctacagctgttgacgcaccaggtgatgcaccaagtaatgcagctaatgtgccatcatctgacgtaatgacttcggtaccaaattgtaagttacctttagaatcctcagtatccttgattacttggacacgttgccctgctgtaatcacttcccaatcttcatttttagcatttgggaaaaagactcttaaatcatccatacgctcatcattagataacatcaattgtgacactaaatacttcgtaagactcatttctttgatacctgcagataacatcgtcacgatattatttggtttaaccgatttaattaaatccatatgtgaacctgtttttaaaaatttaggtgagaaacctgcaaatggaccaaataacaatgaacgcttgccgtctacaaaacgtgtatctaagtgcggcactgacattggtggcgcacccactgctgcttttccgtacactttagcatgatgacgatcaatcacttcttgatttgtacagcgcaggaataatccacttactgggaaaccaccaatatgttttgattgtttaatcccagtcttttggagtaatggtaaactcgcaccgccagcaccaataaatacaaaatcagattcatatgttgtcgtttcattagtttctaaatctttaactttaactagccatgccccagatttctgtttcttgatgtctaatacattctgcttatattgaattcccacaccacgttgctctaaattttcaaataactttgcagttaacgcaccaaagttaacatctgtaccagtttcatcataagttaaagcaattggttcatcagacttacgaccttcaatcattaacggtacccaagatttcatttcttcttcatcttgcgataatttcattttttcgaataaaacacttttctttaacgttgcaacacgactttttataaaagctacattatcttcgccaatgacaaaactcatgtgtggcaccgcttgaataaagcgatctgggttatctaattgtcctgttttaactaaatatgcccaaaactgttttgaaatttggtactgctcatttatcttaattgctttactacaatcaactgtgccatccttaccttcttttgtatagttcaactcgcaaagtgctgaatgccctgtaccggcattattccatacatttgaactctcttcgccaggttgtgctaatttttcaaacactttaatatttttctcaggtgataattctttaagtaatgttcctaatgttgcactcataataccgccaccaattaagatgacatctgttttgctatgttgtgttgtcataacaaatacagtccccctttttaaaatgaataatggaacgttcgagaaatacgacatattaataccactttaaatcaataagtgtctcaataggttcccatggtgatgctctattactatctactatgtatattaatattttataataacgaaactactttaattatatactttatgtgcgatagcacaaagacaaaaccacaaaccttaacagctatcaaccaatttaatttgattgctgattactcactattcattttaacataaagcgctaccattattataatgtcaaacttctttcattaatgatccataaaaaaaagatgagatgttagaaaacatctcaccttctgtatatttatattttgaaatacgtttttttataataatgacaagatgaaagtccaaatacagatgaatattagtaaacatacactgtatttcaatgtcatttttaataattctgattccttaccaacttgttttactgctgcagttgcaattgcaattgattgtggtgaaatcaattttgccgctacaccaccaactgtattagcagatacaagaagtgaaccacttgttccaatttgttgtgcaacagaagcttgaattggtgcaaataatgaattgttatttacaactgatcctgtcataaacacacctatccaacctaagattggtgatagaactgggaagacattacctgctttagctataccttgacccattgctgcacttaaaccaccataagttgtgattttagaaattgctaagatgaaacaaattgtaagaactggtaaccacaactctttaaatgtaacgccgaataatctaacagcatctttaaagttaacctttttagacattaaaattgtaataataatagttaataaaatagctgtacctgtttgtccaataatatttaaagtcaatactaatggtttatgcgtaacttcgctgattgttccaggtaagttgaatttaaatactaatgatgataaagcaccatttggtaagaataagtttttaaagaatggcgcactccaaatcattacaatgactgttaatacaatgaatgggctccatgcatgtaatactgcttttgcagaatgtgcttttgcaggttcaatttcttcatctttattaacacgataaatgtgttttggttggaattttttagaaaatactgctaatgctaacattgttaataacggtggaataatatctgctaattcaggtccactgaatacagttaataatccttgagtaagtgtataagtgattgaaactactaaaattgctggtaatgtttctttaacacctctaaaaccatcaataataaagataagtaagaatggaataatgaaatttatgattgccaatgttaaagttgctgattgagaaacacctaatactgaaacatctccaggtaatttcaacgtttctacaacacctacagggataccaatcgcaccaaaagcaccagacgctgcatttgcgactaaacataacatcgcagcttttaatggattaaatcctaattgtgttaataaaagtgcacaaattgcaattggtacaccaaatcctgctgcaccttctaaaaatgcgttgaatgcaaatccaataagtaaaacttgaatacgttggtcttgtgaaatatttgtaatactatcttgaattgttaaaaattgtccagattcaacagtaattttgtataacaatactgccatcataacgatatagccaatcggaatgataccttggaagaaaccttcgactactgcaccagaagcgataccaactggcaatttgaaaaatggtattgcaattagtaatgttacaacaagtgttgtaatagctgcataaatacctttcattttaaaaacagttaaacatagtaaaaacagtacaatcggtattgctgcaattaaagacgataataataaattatcaaatgggttaaacgtatttactaacataggctgactcttctttccataaagtagtagtgtaattgcttcattaaaatcatgctctggctatagcattttgttatcgataacattttacagaacagtgagattaatgtgatttttttcacaattaaaatataccattttttcagactattaacaatatcactttcctatttaattgttttatttttcattttaaatctgttcatcaaaatgaattgtacttaatgtaatgaagtaacttatactattcatgaattttacataagaccgtgctaaaataaggaagatactacgatgagaaatggaagttatagcaatgattaaacagataaatgtttctaatatgcaaaagtttgaatctcaattaatgaaagctcagtctgaaggttatacacatgtcgttccatatgcaaatgagataatgatttatcaatcgatgttagatgcggttcaattatatcctaagtctatcgtggttgattatactgtggatggacaatacaaaaatgattgtcactatttcggtcaatcatcgatcaacattgccgattgggctcaaaacaataattattatcctaacctgatatatgcgattcaacagactcttgatttaatacattattactctgtagaaacgattttcgatttagctttattgacacttctgaaaggtgatttatcaatcgatggtcatgtcgtttttgattttaaagcccctatagcaacaagtgcttcaatatgggaaactattaaaactattgaagattttgatatgatgtctcagttttatttgaataaaatggcttatattgatcatcatcctataccttttcgcaacctttttatcgaggattcagaacaacttaattcgccagataattggttgtattctaccaagtttatgctacctaaatggttatataaaatagcaaagcaacgtgctgataacaaacaattacaaaacttcggcctgtatacgaagcaaccaaacgttttaaaagatcacatcgtttttatcggtgatcatcatcaatatataggtaattcaaaatatttatttacttacttcgttaaacataatccaatgactgcctgttattttgttactgacgatcgtcgcggaccacatttcatatcacctaagtctgaaaaagctgacgaattgattaacagcgcacgcgtagttatagttgaaaatgatatacctgaaacgttacaaccaaacggtactttaattcaattacatcaaggcacaccaataatgcaattatttttagatagtaaagagcctattaaaaatatagaaacacctttttatcgtgctaaaaggtataatcgctggttgcaattcgattatgttatacattctgctgatgatattagccacttttatcaaacggcttttcctagtcaccaagcaaatgtattggcttatggtaatcctaaacaccaatatttactacaaaagcgtaacgaaagtactactcaacaacagtataagaaatcgtttaaaataaatgatcaaaaaccagttttattatacgcacctattggattagtgagtgcgcaacaattaccactatcagatgctttattcaaagcctatcatgttgtggttcagggtgttgatgaagcgatcttaccagaagaggcgcttgttgcaccaaagtatcttagtgctcaagacttaattctaatgtctgatgtcgttatcactgattactcaaatataatatttgatgcgatggctatagacaaaacagtagcattatacactccaaatcacagtcaatacattgagtctcaaggtgttaacgaagatatttggcgtcatctatcaaaaatttggtatacagaccgacaattattaattaataatttaatttcccaggcaataccagtgattaaatatccacaaatacaacataaagaacaaccattagaatctatttcacaacttatattgtctaagatgacatctaatcaatagtgtttaaatttctcagtggctgtgaatgaggtttaaaagtgctataaaacgtaaacttttatactttaaaatacgcaaaaaacggtaaaccctaattcatattatagagtttaccgttttatttttttaacttgcatcatagttatattaacattattgttggtagtttggatcagtaaccattgcttgtccagtataatcaaccgttacaattgaatattttccatttgcatttgggtctttaaaactaaacacatacttatagttgccattatgttcttcaatagaataatcattatacactttattattactaccaaatttatttgcttcattattagccgcatttaaagctgtttggaaatttggcaattgctgtaaagcttgagttttatttccaataaacggataaatttgacgtgcaaccggcgcggcattttgtccataatatggtgcaacgtaacttgatttttgattattacttgattggttattatttgtttggttttggtcattgtttgttgcatttgaattagattgttgctggttatcgtttgcactattatctttattatctttgtttacgtctttactatcatctttattgtctttcttatctttagatgaatcatttgtttttttatcttgttgttcagttttcgctttatcatctttttctttattactgtctttttgttggtcactatcttgaccacatgcagctaaaaataatgataatgctagtaaccctgtaactaatcttttcatacatatctcctcctataattcgatattcattgaataagcttgaaatacatatctaccatgtgtatcatttcatggcttgttaccaaagacgtcaacattaatatgatttgaattatcacaatacccataactacaatctaaggttctttttattataccctaatttttgttcattattatttaatttttgtgaattttatgttttctataaatttaattattttactttaacaattcattacgcatttagcatttcaaggcatacacaatatttattactatgatttcattttatctgctgcaaaaacaatcattataactctttttccataattaaatctgtatccgttacatcacctgtttgaaaatgatgttcaccaaccactttaaatccatgacgtttataaaatgcttgagcacgaggattatgctcccaaactcctagccaaattttatgtttattatgttcttgagcaattttttcggccaattctatcaattgtgaacctcttccgccaccttgaaagtctttcaaaaaatatatgcgctgcacttctaaataggtctcccccatttcttcagtttgagcactattaatattcatctttatataaccaacattcgcaccatcttcttgataaaaataatgaaatgaatctacatggttaatctcttgtgtaaatttttctacagtataattgtctttaaaaaattgatcaaaatctttgtcatcatagtaagaaccaaacgtgtcataaaatgttctagttgctaattcaactaattcactagcattttgttctgaaatttctttgattatcccagccatataaatcctccaataaacagtgatcgaatcaaaatattacttatgttatttttcagccaaaactatttaaaaatacattaacacaaatcaattacaaattgtattgattgtgtgtaacatcaataaatgatacatttattccagtaaaatggccgtattttcaaaagagaaaaagagaggatgtatcgttgtgatagaaacatttaaagcgtttgtaattgataaagatgagagcggtaaagtgacaccaactttcaaacaattatcgcctactgatttacctaaaggagatgtgctgattaaagtacattactctggtataaattataaagatgctttagcgactcaagatcataatgcagtcgtaaaatcgtatcctatgattccaggaatagatttagctggaacaattgttgaatccgaagcaccaggctttgaaaaaggagaacaagtaattgtaacgagttatgacctaggtgttagccattatggcggttttagtgaatatgcgcgtgtaaaatcagaatggattatcaagcttcctgatactttaacattagaagaatcaatgatatatggcacagctggttatactgccggtttagcaattgaaagacttgaaaaagttggaatgaatattgaagatggtcctgtactcgttcgcggtgcttcaggtggtgtcggtactttagcagtactcatgcttaatgaacttggttataaagttatcgcaagtacaggtaaacaagatgttagcgatcaattacttgaacttggtgccaaagaagttatcgatcgacttcctgttgaagatgatcataaaaagccactcgcatcatcaacttggcaagcttgtgtagaccctgttggtggcgaaggtattaattatgttacaaaacgtttaaatcatagtggatcaattgcagttattggtatgactgccggcaatacttatactaattctgtattccctcacattttaagaggcgtaaacattttaggaattgactcagtatttactgctatgaaattaagacagcgcgtttggcgtcgtctcgcaaaagatttaaagcctgaaaatttacatgagatcaagcaagttattacatttgatgaacttccagaacaacttaacaaagtaattaatcatgaaaataaaggccgcattgttatcgatttcggtgtagataaatagtattcatgaaaaagacatcccgttatgcgagatgtcttttttaatttagtatttgatatacataccgcctgaatctggttcggtaggcataaatccaaattttgcatataatttatccgctgggtagtctgcgatcagactaacgtatgcactttcgacagatacatttttaatatacttcataatatgttccataattagactgccgtaatcttgaccttgataacttttcgaaacagcaatatcaacaatttgaaaaacagttccgccatcgccaatcactctacccataccaattaaccgatctttatcatacaaggttactgtaaataaggcattaggtaatcctttttcagctgcttcgcgcgtctttggactcatacctgcgttaatccttaatgcgcaataatcctcgcaagtcggaatatcatatgtcactttaaccattatttaccccacttttcatcacacaatatatcaacctagtataaatgtttatttacaatagtcttattcgcttctttaaacacttcatgatgacttgaaacataaccctctgcattcgcatctggttggatatatgttttagcaaggttcgctgcatttgcaccatcactaaatgcacttgcaattagatgtgattttgcatcatgataaacaatatctccacacgcatagataccaggtatactagttgtcgtattaccaaatcctttaacacgacaatcatcatgcatatctagctttgaagatgtttcactcaataatgtattacaacgatcaaacccatgactaataatgacatcgtcaaatttaactgtatgcctatcgccactttcaacatgttccaaaacaacttcacttatatgcgtttcatcatcattgccgaccaagtatttaatacgtgtttttgggcatagtttcacatttaaatctgtcaccaacgttttcatcgcttcatgaccacttacatcttcttttcgataaacaactgtcacgcttttagcaatcttggcaatatcatgcgcccaatctaatgctgtatttcctccacctgatattaatacatctttatctttgaaacgtctgtaactttgtacaacataatgtaaattagttaattgatatctctctacacctttaacatctaattgttttggattaataatacccgcaccaattgcaatgataactgctttcgatgtatatatttctcccgcttctgtttcaacttcgaaatgacgttctgcctttttcctaatatctaccacacgttcattcaaatgaacttccggtttaaaatataatccttgcttaattgtatcttttaaaatttcatgacaaggttttggcgcaatgccgccaatatcccaaataattttttcagggtaaattctcatcttaccccctaattcagattgaacatctatcaatcttacagacatatctcgcaatccagcataaaagcttgcatacaaaccagacggaccgccaccaatggattgtaacatctttcattatgtgcctcctatgactctctatattcatttctttcattaacgtgctcaaattgataattattatcatttaaagccattatactattaatatttatattgttaaaataaatcgcatagttaatcatgaattatcaataactatcccatcacaatataaaaacacacctttcaaagtaagaaacaacaatgttcctttgaaagatgtgtatattttttagttctagttatattattttttaaaagactcatcacgtggttctttaagaattgcttgtcttaaaaggaaaaatagcaacaataaacctgcaagcatacctgtgtgcccaatacctgcaaagcctgcaaatgcttctggagagtatgatttaccagtgacttggaagaatccttttgtcaccatcatacctatagtaacgataacacctatgttatatacatagaagaaccagttaaataagtagtaacttgataatttaaataacttctccaatggtaataatattaaaaacataaacatacctaaaataagtgtatgtgtgtgtacaagtgataattgtgttgtaccagtaaaatcatatgcttttgttagctctctatagaaaaagccactaaataaacctatgatcatataaaaaagaaatgaatataataacctacgcattttgaatcctccctcaccttttcattatatccgattatacctattataacagtgacaaaaaagcgaagatatgacacaactgaatttggtttagcacatagtatgacagctaaaataactttacatcaagcgctatacaaataaaatagctataccatgacgctcgctacaaacgtcttgtatagctattatttctatttattaaattatgacggcacttcagtacgttttgtgctatgttttctaacaatagctgaaactaaacttgatacagcgccaaaaatcataaaccctataaacatccacattgtactatttaattcaatatgatgattcaagtataatagttctcttacacttgttgcatagtgtgtgaatggattccaatcatatacatatttttgataactttcaggcaacatttgtttaggtaacgttacaagttgcatactaaagaacattaaaatgaagaaaattggaactgacttcatacctagccataccataacacctaaaataaggcccacgaaaccaagaatcgcaaatgctacaaaaattgcgatacgatttggatggtcaaaatcaaatccttgaacgccttgcatgaaataaatataaacaaagctacctgcaaatgctgcaacaactgcaaatatcatctgtccaattgaagcaatgatacgatgttgcacgacgatattgttactagttctaaatgcaaagaacaataagatagacgttacgattgaacctatccaaattggcataaacattaggaatggtgcattaccacctgcttggtgatctttaactttattaagtttttcattatccacttttactggattcgtcaaaccattgatgtccgcggcattgactttaacattttgactcgttaatgtttccaaactttgcttcgtaatttgagcattaatattatcacccataccagttaacacagctgatgcaatttgtgaaccttgtaagcttgatccttcacttacaatcgttttaaatttagcctgcttaacctctacttgttgattccccattttttgtttcatttgttgaaccacttgtggcggaatttcacctgaagcaactttttgttgcatttcttcttttttactatccataactactttttgtgttttactcatagcatcttttgaaaagtctttatcaataatagctactccaaagattttttgatctttcaaatctttttcaaggtctttttcactatcaaccttaacccatttaattttattagaatcactatctaataatttatcctctaattttttaccaatgttaacatttttatcttgaatcgttgtacctttatcctcgtttaatataccaattggtaaatcttttggtttaggattatatgcaggataaaaagctaaagaaaagattaccaagataatcatagttgctattggcgcaatccataataatttatttttaaatatattcattttattaattacctccttattagacaatgtgttgaatatttcgcatgttgtctattataatatgtaagtgggaataaacaatacacaatgttcatcaatacgttcattaatagacaaatacacccacattgttcaataacacaaggaggttgatttatttttgaaagaagataggcgaattagaaagacaaagtcctccattaaacaagcgttcactaaattactacaagaaaaagatttagaaaagattaccattcgcgacataacaacacgcgctgatatcaatagagggacattttacttacattacgaggataaatatatgttactcgcagatatggaagatgagtatatttcagaactaacgacatatactcaatttgatttgttacgcggttcttcaattgaagacattgcgaatacttttgtaaataatatactcaaaaatattttccaacatattcatgataatttagagttttatcatactattttacaattggaacgcacgagtcaattagaattgaaaatcaacgaacatatcaaaaataatatgcaacgttatattagtatcaatcattctatcggaggcgttccagagatgtatttttacagttacgtttccggagcaacaatttcaattattaaatactgggtaatggacaaacagcccatttcagttgatgaattagctaaacatgtgcataatattatttttaatggtccattaagaataatggcagaaaaccgtttgcataaatcaaaccttgattcactaacttaagtaatactcgcttttcctaaatcctttagaaaggaactatatatcatgattacttcattcagacattctgaagatatagataaacatattataaaaacaccattagatcatacagcgtcatggattaatgtagtagaaccagaccgagaagaaattgaaaatcttatggaacaatataatatacctgaagactttatacgtgaccctttggactcagaagaaagttcccgtattgaatatgacgaagatactggttactcattaatcattattgatttacctatcgtcaattcaactaatcgtagcgttctatcttttgtaacgattccattaggcattattattggcaacggtattatcgtaacagtttgtgacgctgaaaatgaatttttagaaaatttacctaagcgtgatattaatttaaaatttcacagcagatttgcattagaaattttaactactattgccgaccattataatcgtaacttacgattacttaataaaagtagaattcgtattgagaaagaactaaaaaataacattactaacaaacaacttttcaaattaatggaagttgaaaaaagtttagtatactttttagctgccttaaaaggtaacgatacaattattaaaaagttattccgtttacctgcaattaaacgttttgaagaagatgaagaattactagaagatttaatcattgaaaataaccaagccatcgaaacaacagaattacatcaacgtatcttagaaagtatcacaacatcatacgcttccttattatctaatgatatgaatacgattatgaagacattaacacttttcacggtactattaacgttaccaacgctcgtatttagtttcttcggtatgaatgtgccgttgccaattgatgaccatagttatatatcttggattattgtggtaggtatttcattaattcttgtcgtaattgttagtattttcttatggcgtaaacagaaattataactaaattaaaaggtatgacagcttaaagtttcatcctattgcatttgcaatgactgatactttgattactgtcatacctcttttttattctacaacttctttatttgcttttcttttagataaaattaaagtaactgttatagcaatgatgaatgatattgtcataccaacaaagtagtgtaaccatcctgcatgtactggattgattgaaataaatcctggcaatccagcagttcctaatgcgattgctttaaccttgaagaaagcaatatatgctgaaccaatacctgatccaacgatagcgccaataaatggatatcttagttttaagttaacaccaaacatagccggttctgtaataccaagtaatgctgaaatacctgcggcagatgccacaccttttaacttcttattttgtttaataataaagaacgctgcaattgctgcaccaccttgtgcaacattagacattgtcgcaatcgggaatataaatgatccacccgttttagtggcatctgcaattaatgtcgtttctacagctataaagctatgatgcatacctgtaataacaatcggagcatacaataatccgaatattaatccaccaattgcaccaccaaattcataaagccatgttaaaccatctgataaccagtaacctaattgtcgagtgattggacctacaaatgaaaatgttagaaatgctgttataaaaatagataacaatggtgttaacaaattatctaacaccgttggaataactttgcgtaaccctttttcaattgaggctaagatataagctgctacaagcataggtaacacttgtccttgataacctacttgattaatatgcaaaccaaaaacatcccaatatggaatagccttacctgcttcaactgcttttgggaaatcgtatgcgctcattagcgatggatgaactagtatcatacctaatacagcacctaaaaatggattgccaccaaagcgttttgctgcactaaatccaattaaaattggtaataatgtaaatggtgcattcgcaaaaacatttatcatttcagctaatccagcaaattgactatatacatctatcaatgatttacctgaaaagaataaatctttcgcagtcaaaatgttatttaaccccattaataaaccaccagcaacgatggctggtataatcggaacaaagatatctgaaagcatttttacaaatcgctgtaacggattcatatttttagcagattgtgctttgacttccgaagtggttgatgcttcttttccagttaatttttccagttcactaaatactttattgactgtaccagacccaataataatttggtattgtcccccagtagaaaacgtccctttaactacatccatattgtttagcgcctcttcatttactaaactttcatcatttaaaactaatcgtagtctcgttgcacaatgcgccattgcatctaaattctcttctccgcctatcgcgttcaaaatatcttctgcggattgcttataattcatatatttagcctcctaattagaaccggttccatttattccactttattgtaaccggttccaaaaatatttgcaacactctattatcattttatataaacacctacaccatttttgatagcgcattcatttttattgctatactatatgcatgtatattaacattaattatcggaggtaattttatgaaagaacgtggccatatcgaacagctttggcgtgaggaaaaatatcatgtattgttacacagtcaacagtcttaccaaatgataaggaatgctttaaaaacggatttatcacttcatcaagtccaacaaatgattgatgatgctttgttaattgaaccgagtataggaagtgtatgtaatgcttttgatcatatgtggggatattttaaaaaatgtgcgaatgaagaagaaagaaaacaatcaaaactacttaaagctgattttattaatggtaaaatcgacacccaaactttattagattttttagcagaacttgctaataaatatgatgttcaatatttactacaaagtcgtgttttaaacacaaaaagaaagagatagattgaaactttagttgtaacggacaaatagtagtcattggagttcagcaattcatactttgtactaaagtttactataatctatctctcaaggtttaaatgtacatatctatattaagatgcgtttcatgatgttagaagataccatacacatttaattagttacagcataaatcaatttatacccttaattattacattgtttatattttaaattcgggggagtaattttaagtaatatcttgttgctgctaattctattgttaataaattgatattagatgtagaaattgagtgtgaaagttaataatagatgatttagctagtaacataattaattcatatatagtcaaaaagttctgttagatactgttcttgatgaatattctttgatgttaggtgttagctattctagatgagtttcttagatgtggatgcctgtcttgatgaagttatctatgatgttaatataatacttgatgttgattcttagatgttagtgcgatttcaagatgctgattctttgttgttgcactatcttggtgacgtttctagttgtttatagttatcgcatctcttgatgtaaaatctaagatgtttatgcatttctagatgttaattcttcgctgcttaagaattatcttgatggtaaatctagttgtgccatgcattttctcatgatgaatctaaggtgttaattcattgatgtgtgctgtttcttgttgcttcattatcttgatggtgaatttcgttgtctaatgcactttttcaaatgattattctaattgttacggcaataactagatggattttcttagatgttcacttttctagatgtttatacttatcttgatgttttctaaacagaacttttaaacgctttattttttagtagattgtttaaaatttcttagttgatggttattgttgttgatttgaataatttgtagcgaatattttgtaacagggctactaagaatttttataacaagaagtgatttcaatcgtactaattttcagcgtttgatgacaaaagtgtatgtccaaacttaaataatggcgataaaatttaagtcatgggtacatttaatgttttttgattcaaacttccattttggtcaatttgctttttttataacatagttgaatatcaataaaagattagcaagttagttcaaaatggctatgtattgttttttgaaatacataggtttgaaatctatattaattatgcaccaaataatttaattagactctatcgaaaatttccaaattttgcttactatctttctaattttacttttatattgtgcacaatgcataaaaacaagcgttttcctaggagttttcattaatttcttttatttttcactattaccttttcaaaaatattcaactataataggtatactatccatgattttaaaaatttccatgttttacatttaaatgatagatttcaatatatattaggcaggagagagaaatatgacatgccaacttaaaatacatcatacattatcgacaataccaagtcgtaatattaataatattatggtgctattttcacttacaagtaaactcaatattacgattaatggtgaaaccaaagacgtaagtaattatattatcttaattaaccatggtgatatttataatattaaccacggcgaaaatataatcgaattaatgatacccgttttttatttttatcaacaagatgatgatttctttaatggttatttagatcgtcatttattacaatcaagtaattatattaagtcattaattgccgatttaatcagtacaccaacaagttcttctttaatggggaaaaatataggtcaaagtattatagacactttacttaaagaagcttttataagaatagatcatgaatatttaccaaatattgctttaagcaatccggtgttcatagactgtgtaaactatattcatgacaatattgatgcgcacttgtctttaaaagatatagcgatgcattgcaacatctctgaatcatattgttctaatctttttgttcgatatttgagtatgaattttaaagattattttacaagtattaaacttgttaacgccatcaatttattactttctacaaaacattctattacaactgtttctgaattggccggttttaacagtcatacaaattttgcaaatcaatttaagaattacttgcattttagtcctaaacagttccgttcactcgtttccaagattactgaaccaccacaaatacacttccaacaagataacgtatcacaattcactgagttaatttcaacaattgatttaacagctcaactggctacaaatacaacagatattcatatagatgattttaatccgaaagatcgaagtcagcgtgccaaagtatttgttcgatttagtaatttcaatgaactatttcaatttattttcaatgaatattacgatattaactttgagcacttaccaaaacctgtcgttttcattgacgatattcacgatattgagattagccaaacgaattacaacctgttaaatagatgttttgaaaagcttttcgaaaaaaatataggtttagcaatcgctattaaatcaacacaacaattcgaaacgatgaagcagttaatactaacatttttacaaggcaatcaagactataagacaagcaagaaattagttaaatttatgctcgtattttgctctaattctatgacagcagaagaaattcatttatgtcatcttaaaattaaaaacaaaaataaagaaattaaatatagtgtgacagtcgatggctttttagaaacttattcaaccgtggaacaagtttatgatgtcatgcagcgtcttaaattccattattactttattgatattgaaaattcaaaaactgcaacacatcttatcactaaaaaccaacactatcatcaaactgacactcattttgaacagtataagaaatttattttagattcaggtatatcatcaacacaatttgtatataataacctgtctgtaagcggatttaaatatactaatgatggtaagaatccaattcaattatctgacatagtgtatcacttaatcgcattattacgatatggcggtggcattagctatcaattattagatgaccattcaaattatatttccttgtacaacaaatatggtagccccctaccattaatgcatttatataaaatgtttagaccttttgttaatgaagatattgaaattacaaataattatgtattgagtcgtaaagataataactaccatttcttattattcaataaaattaatgatcgatatatgtcagacgtaaaacaagatttcattttccataatgaattacctcaagactctttgatgattattaaaacattgaatcatgaacatggttcaattcaacatttgcttccaataagcgatcaacttgtttatatagaaaaagaaattttagatgaattagacaaaacgaattaccctaaaacggagcttgcagttcaagaagaaactggtcgtacatttgaactcaagttaaatcacgacgaggttaaatatatttgctttaaaccaagctaaatactaacagtcctcttgtgtttagtttcttacgttaaaggctatttatatcataaggagatgatatgtaatgagtaactcacaagcaattcaagcaattgaaaacgtgttagcaacgtcaaaagttggtgtattatcaactgcatataataacaaacctaatagtagatatatggtcttttataatgatggtcttactttatatactaaaacgaatatccattctgctaaggtcaaagaaattaaagataatccagcagcatatgttttgttaggctataacgacacaactaatcgtagtttcgttgaaatggaagccacgatagaagtagttactgatcaaaaagtaatcgattggttatgggagactcaagataaaagctttttcagttcaaaagaagacccagaactttgtgttttaaaggtgacaccacaatctgttaaattgatgaatgacaaatcattagatacacctatcaaaatcgatttataacacaaagtatatataggaaataacttttatgaattctagatataacaatgttaaatacttaaaataactcgctataattaaagtgtttaatatgtttacaatccaatttgcaatgtattgtttttagacacactttattcacatttaacgtgattagggtgtgtctttttaaattaattttatgtaatataaatactgcatttgcaaactgttgcacttttaggtataacagaattaactacatttaaggagattgatgaaccatgaaaaagaaaaaaggttttggtcttggtattagtttaatcgccatcatgttaattgtatgtattgtattagtaatcatgatgatgactggcggaaagaaagatacatactatggaattatgaaagataatactactattgaaaaaatgattagtgaaaaagatgaaagtattgaaaaaaatgttaaattaccttcagattcagatgttaaagttaaaaaaggtgattttgtaattgtttataaattagcagattcagataaaattgttaaagttaaaaaagttgaccatgatgacgtccctcacggtttaatgatgaaaattcatgacatgggcaaaatgcacatgaaacactaattaagctttaattttgagtaatatagaagatattaaaagcagcagtaagatgttttctaattgaaaattatcttactgctgctttttaagaattactgtgtcagtctattttcggttcgcctgcgcttttgcgcatgcataaaagcccctaacaacctgaggtcactgcgcttcggttcgcctgcgcttttgcgcatgcataaaagcccctaacaacctgaggtcactgcgcttcggttcgcctgcgcttttgcgcatgcataaaagcccctaacaaccaaaggttgtaaggggctttaaatgtcagatagtattttttaaattgattttaaatattcttgaccttttgctttgtcatatacgttttcccatttagctataacgattgttgataatgcgttaccaataacgtttacacatgtacgtaccatatctaagatacggtcaacaccaataattaatgctaaaccttgtgccggtaagcccatggcacctaatgttgttaataaaacaacgattgaagttcctggtactgccgccatacctttagacgtaatcattaatgttaacatcaacacaatttgctctgataatgttaagtgcattccatacatctgtgcaacgaataatgctgcaatagattgataaagtgctgatccgtctaagttaaacgtataaccaattggtataacaaaagaagtaatttcttttggagaaccgaagttttccattttcttcatcattacaggaagtacagcttccgaacttgatgtagaaaatgctaaaagcaattcacttttcaagattctaataatattcatgatattaataccacacatccatgcaactagtcctagtatagcgaatacaaagaacaccattgcaaagacaacaactaatactaattttaatagtggtaataatgcggatgcaccaaatgtaataattgtagtacaaatgaatgcaaacactccaagtggtgctaattttaaaattttattaatcatccagaacacagcttcaagcgatccgcttaaaaattctttaactggttctgcttttttacctacagcagctaatcctaatccaaagaatactgcgaagaagataataggtaataattcacccttatttaaagcttcaaaaaagtttgtcggaataatatgtacaatggtatcaataaaatgatttccatatgtagattgttctgctgcatgtgcagttgattgatatttagaaatatcacctttaggtaattttgttgggtctaatccagcacctggtttaaataggttaccgaagataatccctaaacctattgcgattgttgtaataatttcaaagtataaaattgttttccagccataacgccctacagttttcgattccccaacgttcgaaatagaaagcgctagtgagcaaaatacaactggtataacgatcattttaattaaatttaaaaatacgtcaccaaatggtttaatgtaatttgctacgttttcttgtccatataataaaagtcctacgacaacacctaacactaatgcaataacaacttgcataggtaggctaatttttctcttgaatagagccatagtacaaactccccttcatctgacatcactcaattatatcagaaaattgataattatctataaaaaattaaaatatttatcttttatagatgtcaaaaatcactaatttccatacaaaaactgtttacctcaaataattaaaattgaaggcactaaactgtttcaccagtttaacgtttcactattttgatggtttataattttgattgaaatatttatgctttgcagttttcaaacttttcttagtctctgtatcaaagccttcaacaaataatcctttattagtactgattggttgcacaacataagttacaccaggttcatctttaaacgtaacttccttatagaagagaccttttttagcactatactctgttttttctgatttaattttatcttttagatttttctcttccaagtaactgtcaattagttgaatattcttatggccttgatatgttttcagaccaaagaaaaatgctactgcaacaattaatgaaataaataatataatgataactttaatcgcgttttttttcttcttcattatgtaactcctttttgcttatctattcagtatgaacgaatcaatttatttaataaagagtttttaccagattgtaacaatttttttattctcaatattattatagaaatcgaattacatacacgatgcttttaaaaaatttaataacaaattttattttactatctatcaaaataattgactacttttaacaattaaggatgatacaattacatttttttcaatttaaaaaatcagtcatatcagtaattaccgatgaaaatactaagatatcgatatattttgcattatttaacatttaaattcaattatagacaattcaataattgcgatgaaatcagtacttgacaactattacacttcataatattgtttattttaacaaggagtgattggatgtatgtagaaaacagctatcttagcaagcagttgtgttttttattttatgtttcttcaaaagaaataattaaaaaatacacaaactatcttaaggaatatgatttaacctatactggttacattgttttaatggcgattgaaaatgatgaaaaacttaacatcaaaaaattaggtgaacgtgtattcttagattctggaacactgacaccattactaaagaaattagaaaagaaagattacgttgttcgaacacgtgaagagaaagatgaaagaaacctacaaatttctctaacagaacaaggtaaagcaataaaaagccctcttgctgaaatttctgttaaggtctttaatgaattcaacatttcagaacgagaagcatcagatataattaataatttgcggaattttgtttctaaaaattttgactattccgacagaaagtaactccctatcataaggtgatgggcagaagtatgcatcgctatgtttattcattatctttattgcttgtataaatctcgatgctcagttcttttgccctgattccttatcaggcacaaatctacccatttataacttttttatctccccttttactttatcttttttaatactactcatataatggctttgtaatacaaatttctataatggaagtgatgatattgaacttcaatcaattcgagaatcaaaacttttttaacggtaatccaagtgatacatttaaagatttaggtaaacaagtatttaattacttttcaacaccttcatttgtaacgaatatatatgaaacagacgaattatattacttagaagctgaactagcaggtgtaaataaagaagatattagtatcgatttcaataataatacgctcactattcaagctactagaagcgcaaaatacaaatctgaacaactcattttagatgagcgtaacttcgaatcattaatgcgtcaatttgattttgaagctgttgataagcaacatattactgctagttttgaaaatgggttattaaccattacattgcctaaaatcaaaccaagcaatgaaactacttcatcaacatctattccaatttcatagttaaatttaaaatgaatacactactaaagccttaatgtcatgctacgaatattgtgcatgatattaaggctttgtatttaactaaatgaatgtcatgtattacatatcaactgtgtttcaatgaaccatattctttttgatataaatggcgcatggtaaataatgcaatgcatccaaataccgctaagaaaataaatgctaaatggcttgaacctgttaaattagctacgtatgtgatgaccaacggtgggaagaatcctcctaaaccacccatcattgatacgataccatttgctgatcctgcttcatttgagaagtaggatggtactaatttaaaaattaagccgttaccaatacctgcacaaatacttattgttaaacagcctacagtgaataatgcgatatggtctgaaatacctaaaataacggcaccgataatcataataacaaaatcaatcatcagtactttaactgcattaaatttatcacctagtataccacctattggtctcaagaatgttgccagcgcaatgaatacacctgaacgaataccagcatctactttgtcaattccaaaatgatttactaagtagttaggtaagaaaataccaaatgctacaaaagcaccaaaagtaatgaaataccaataacttaagtaatataatttgtagtttttagataatgttttcatttgggccattaatggcactttaattttacgttcttgtgtgtcaccaaaaatgaacataattaatgcaaataaagcgataataattaagtaacttctaactgttgtttgccaaccaataatacccgctatcggtggtgctaaaaatgaagaaactgctgtaccgatattccccataccataaataccatttgctagacctactttttcttttgggaaatatttaggaactgatgtaacaccaacagagaaaattgcgccacctacgccaaggaaaaatcctgatgccattaacatacccggcgtttgtgcttggcttaagaaaaatatcgggaataacaatacgataaaacttgtaaagaatacccatttagcaccaacaatatttgttaaataaccaaatggcacacggagcactgatcccaaaataactggtatcgctaaaatgattgatatttgaccttcagtaacattgacatcttgtttaataaagggcattaatggcgcaattatactccaagccataaacccaaccactaaacttaatgtttgtaatgtaagttgaaagccaccttttgttttgtacatacgtttcaccttcatcaaaatcatttattttttaatagatatcaatactctgcctatatattagaggtcaatgttatttaaaaatgctttcatttatatgaaaacattcaatatagacaaagtattgactacatatatattttattatgattgtgaaaaagtgaacataaggattttcccttatttatgaagtgatttaccctatacaatgtccctttaagatgcttttagacacttattcgccatcattttaatcatattatttaggaacactcacatacttttcttatttttttcaattagttacaattactgcttgaaaatcacgttacgttatcctttatgctgacaacataaggaggtttatcatgtataaaatcaatattattagatcagattccgtctataagaatatactcaaggcaccaataaacgaccgtgattcaattttcactaaagaaatattagtaccttttaaaaagaaatttgaggtacaacatatgcctatttataatgatgacaaacagacaatgagtgcgattcaatttttagatgcctttcaaatttctcccaaagatttacgcatgtctgaccaaatgtcaatacaatacctgaataatgatttctggagtaattgcgaaaaatatttaaaagttgctatagatcaattttcaaattatagtatctcatctcaagtttctaactatcatttcacagtattacttggagatagccaaaaaccacttatgtatctaaataaaaatcgcggtggtgatggtggcataccaggttatattatgatttatttagtgccgagtacaagtacaattaattctatgaaaagcttaattgcacatgaagtaaatcataatatgcgctatcaatatattgattgggatggcggaagtttgattgaattgattattgcagaaggattagctgaaaactatgtagaatcattgtatggtaaagcgcatattggaccgtgggtaacaaatactaattggagtcgtgataacgtaaaaattaaaaatactatttataatcatttatatttaaagcatatatttgaatcgatgccttatctctatggtgatgatattaataaacttcaaggtaggcctatcgttggcctatctcatgctgccgggtatgcatgtggctatcacttggtaaaatactttttacaaaaaacaaacatacctattgaagttgctacaacacttccagcacaaaaaataataaatgaggtgactgaattttggcatacacatacactttaaaagatattattgaaattacaggtgtaactaaaagaactttacattattacgatgaaataggattattagttccagataaaaatgataaaaattatcgcgtttataaacagcaagacttagaaaaattacaaaagattttaatactcaagtcttttgattttgatatcgctaaaataaaacaatacatttcgtatgataatgaacaattgcgaaagttattatcagagcaaataagcaagttagataaaaagatttctgacttacaattaattagacgctctgtatgtgaatttattaaaggactctctctaatagataccagcattttaaacaagacactacagtcacaatatgataaagaagcatctataaaatatggtcatacgaaagcatatcaatcatttattagacgtaaagacagcttacaatcgcaggatatcagacataaattgacaactatcttcaataaatttaatcatatgtctttgagtcattatccaatccaagattgtagtgatctcgtatttgagtggaaggcatttatgaacactatcgctgattttgatgatgaaacattatgctgtattgctaaaacatatgaagatgatacgcgtttcaaagattactttaattcatatgataatcaaaatttagcatcatacatttcagaagctgttaattattttttgagcaatgtgaataagagcgacaatttttaatcctcatacagatgctacaacactgaatacaccaactaaaataattgttcaaagtagaaaactaatcatttattctctaaatcaataactataataaaagttatacctttgcaaagcgaattagtataggttaccgaaaggagaaaggattaggttccattcgatttataaaaaaatatatttcgaaacatacaaaagcgccagaagataatcatttcctctcgcgcttttatactgaattatattaatttcaaactctaaaactctaataatttctttttcaatgcatattcaactagctcaggtttactctttaagccaagctttgtcataatatgcgtcttatgtgcttctactgttttcacagatacaaataatttctctgcaatttctttattcccgtaacctttggcaataagtggcaatatttctagttctcgttttgataagattttaaaaggatctgttgtgtttgcagtgtcctgatttgaattagatacaaattcattcactaaagatgttgtaagtttcatatctacatatgtttcacctttatatacagttcgaatagctaacaataattgttcatcaggtgcatttttcaatatgtaacctttcgcaccattacgcaacacatggaacaaatactcctcatcatcaaacattgttaatattagtattttagtttcaggaaaactgtcagcaattttactcgtagcgataagacctgactcacctggtggcatacttaaatccattagtaacacatcaggtttatattccattactttttggtaagcttcgacgccatctgcagccgttgcaacaacttccatatcattttgataatttaaaatcatagagaaccccgtacggacaacagcgtgatcatcggcaatgactattttcaattttattcccccaatgtatgtttcaaattggaatgttcaatgtaacattggtaccctcaccaattttcgtttcaatattgacgctaccgctgactaactcagctcgctcattcattccatataaaccgagtccagaacctttaggcttagaacttggatcaaaaccatttcccgcatctatcacttctgctaccaaatggcgcccagtttgacggatacctacatttatttcatttacatcagcgtatttcaacgcatttagaatagcttcttgcactactcgataaacaaccgtttcaatatcactatcaaagcgagtatttttaatatttgatgtatatatgatttttattccataattttcttcaaactgtttaaaatatgatttaaaagctgcttcaagacctagatcatccaaagaagcgggtcttaattcaaccgacatattacgtatatcatcaattaatttagcgacaatatattcaatattttctgcgtcttccaaaagcttagttgtatcttcttgatattttaataatctcaattgaacatctacattgagcatttcttgaatcacactatcatgtaactctctagaaattcgctttctttcattttcttgggctgagattgttttacgcatcatacgttgttgatgtaatttctcttgctgttcaatttgtgatgaaacattttgaagcgtaaatgcatgaattcccctgtcttgatcaatcaactgatatgttgctgtaaatggcatcactttttgatctttcgtcttcataaatacttggaaattcgtagcttgtacttgcatcgattctaagaaacagtctttacatgattgtacatcataggcatttgtatacccttcacatctgtgacaaatcgcattcgccacagcactgtaattatcttcttcagataatatatctttagcagcatcattcattgcaataattttgccgttatcatcagcaaaaactatcttttcgattgaatgctcataatattttttcaataaagtatctaactgtatactgtcctcattaatcatgacttacaccctaattcatctcattatttatcatcattgaaaataccaaacttacgttgaatatcatcattatcaaatatttttggtaaaggacgaccatctctttgaccaaataatagtacgccatacacttgattcttataccaaagcggcactgctaaaactgctgttaatgattcgctcaataaaattggatagtcaatcttttcttcaggccctaaagctaaaccaacattggctattaccatacgctttcctgttttcataacagttccagctaatccacgaccttttcttaaaataatcaatttaaatcgattatttttattacctgaaacatagtgccattttattggagatgatggtttgttagattcatagaaagcgattgccgcaaaatcataaccctcttctttgcgtattttatctaatgtctcttgaaatctacgatcttcaattattgcttctggtgtcaaatcctttcacctcttatgcttacactttattcttacggtaaataatatatctgcgatttatatatgtcaaaggtacactccaaacatgtaccaaacgtgtaaatggccaacaagccataatagtgaaacctaacaatatatgcattttaaatgcaatcggcacaccactcatcaatgacgcatctggttttaacataaataattgtctaaaccaaattgataatgaagttctgtagttaaaatctggatgttgtatattggttactaatgttgcgtaacatcccataaatacgataagtaataataagaaatttacaaatatatccgacgctgaacttaatcttcgaatacttttcgtagtaacacgtctcgctgttaataaaaacatccctatcaaagttattataccaaagatgctaccaatataaacagcgcctatatgatataaatgctcagatacccccactgcatccatccatgatttcggtattaacaatccaactacgtgtccaaaaaacactggaataatacctaagtgaaataataaacttccccacatcaacctttttctttctattagttcactagatttagctgtccaagaaaatttatcataacgataacgtgcaatatgacctgcgacaaagacaactaaacataaatacggaaatataacccataaaaactgattaagcatgatgtttcactccttttggtgatgtcaaacataatttcaatgtttttctaagtgcttgaatcacataggcatatggattattatcttcaccaagtgcattcgccatcacatatgttccatcctcaataatcataatgattaattgaatattctcttcagctcttggatcatttcgccattctgccacttgcaaaaattgaagcatcaacggtagataatcagaaagttcattatctaccatttctagtccaaacatttcatataatacctttaatttagctaacatttgcccacgttctttttgcgtatcaaatttgttatacgtcatatataatggtgcttttttcgtaaaatcaaatgtatctgtataaatcgctttgatttctgataatgaaaatgtcatcattacatttctaaatgctactaaatcttcatatgctggatgatctttcgaaattgtttcttcaaaagtttttggatgaaaagttaatttttctggaaaacataactgttgtgccatatatccaaaactttcttgatattttttaaaattatcgaaattaatcacggaaaatccctccatagaaattctcattataaatttcttgaccagttttccctgaacctactgcaacgccacagccttcacagttatctccaaaatgctcgccgccgtaattgtatcctgtactaccttgtgcgtgatacgtatctaaataggtttctttgtgtgatgttggaataacaaatcgatcttcatatttagctagtcctaataaacgatacatgtctttagtttggcgctcggttatacctaatcgctctaatcgagacgtgtcaaatggctgttgagtaacttgagatctcatataacttctcatcattgccatacgttgtagggctccttttactggctctgtatctcctgcagtgaaaatattagctaagtattcaataggtaaacgcatttcttcaatggctgggaaaatcgcatctggattttgagttgtatttttaccttcaaaatagctcataattgggctaagtggtgggcaataccaaaccatcggcatcgttctaaattcaggatgtaacggaaatgcaagtttatattcaattgctaacttataaattggagagttttgtgcagcttcaatccaatcataaccaataccatctttttcagcttgagcaatgacttcttcgtcaaatggatttaagaatatatctaattgtttttcgtataaacctttctcgtctactgctgaagccgcttcatgaactcgatctgcatcatataataaaacacctaagtaacgcatacgtcctgtacaagtttcagagcataccgtaggcatacccgcctcgattctcgggaaacagaaagtacatttttcagctttgttcgttttccaattgaagtaaactttcttatatggacaacctgtcatacagtaacgccatccacgacatgcgtcttgatcaactaatacaatgccatcttcatcacgtttatacatagcacctgaagggcacgatgcaacgcaacttggattcaagcaatgttcacataaacgtggtaaatacatcataaaagtttcgtcaaattggaatttaatatcttcttctattttttggatgttaggatcttttgggcctgtaacatgaccacctgctaagtcatcttcccagttaggtccccattcaatttcaatgttatcccctgtaatttctgaatacgctctagcaactggcgaatgcttccctgatttcgcagttgttaaatgttcataattatagttccatggttcataataatcttttattaatggcatatctgggttataaaaaattttacctaaagcaatttttgaaattctacttccagattttaattcaagtttccctttacgatttagtacccaaccacctttgtagtgttcttggtcttcccaacgtttcggataccctacacctggcttcgtttctacgttattgaaccacatgtactcagcacctggacgatttgtccaagtgtttttacatgtcacactacacgtatggcatcctatgcatttatctaaatttaataccatcgcaacttgcgctttaatcttcaagccaattaacctccttcatctttctaactgctacatataaatccctttggttcccaattggtccataataattaaagtgataactaatttgtgcgtatcctccgactagttgtgttggtttcaaatggattctagtcggcgcgttgtgtgaaccaccacgtgtatctgtaatttctgacccaggcgtttgaatatgtttatcttgtgcatgatacataaacattgtacctttaggcatacgatgcgaaataactgctcttgccgttacaacaccattacggttatacacttctagccaatcattatcttggatatcgtgtttttcagcatcttcatttgatatccaaaccgttggaccacctctaaatagtgtcaacatatgcttattatcttgatacattgagtgtatattccattttccatgaggcgttaaataacgcagtaccaaagcatctgtaccacctttaattttcttatctctattcccaaataccattggcggcaatgtcggtttatatactggtaagctctccccaaattgttggaaaacttcgtgatccacataataactttgacgtcctgttaatgttctaaaaggtactagacgttctatattcgttgtaaatggtgaatatcgtcgaccttgtttatttgaacctgggaatactgctgtcggtattacttctcgtggttgtgaagttatatttaaaaacgaaattttctcagcagcacgttcgctagaaatatcttttaacggcattccagtttgttcttcaagatcttcatatgatttttgtgataatttaccattcgtagcagatgaaatacttagtattgcatctgctacattacgtgctgtatcaatacgcggacgattcgctctcacagaatcatcatttgtatcactccacgtacctaacatactttttaattcttcatattgttcactgacaccgaaacttacaccatgtgctccaactttccctttttcaagtacaggaccaagcgtgacatatttgtcgtaaattttagtgtagtcgcgttctacaattgcaaagttaggcattgtacgtccaggtaccgcttcaatttcacccttcgaccaatctttcactacgccgtatggtgttgaaatttcttgctttgtatcatgactaagtggagttgtcacaacatctttaaacgttccaggtaaatagtcttttgccatttctgaaaatgcttttgccaacgttttataaatatcccagtctgaacgcgattcccataatggatcaatagctggattaaaaggatgtacatatggatgcatatctgtagatgacaaatcatgcttctcataccaagtcgctgctggcaaaacaatgtcagaatataaaggtgttgctgtcattctgaaatctaaagaaacgactaaatctaatttccctgttgtttcctcacgccacgtaatttcttctggcttttcatcttcatttggtgtagctaataaccctgattttgtgccaagtaaatgcttcataaagtattcttgaccttttgcagaacttgagattagatttgagcgccatataaacagtgatttcggatgattctttttcaaatccggatcttctatcgcaaattgcgtttgttttgacttaacttcatttatcgctcgttttaaaattgcctcattcgactcaatgccttcatctttagcttcttctgcaaacaacaaactatttttattaaattgtggatatgatggtaaccaaccaagtctagctgctaaaacattataatcagctgggtgttgatgctttaaatcctctgttttagctaatggagattttaaacgatctacatttgactcttcatatttccattggtctgttgcaaaatagaaccaacttgttccattttgcaaacgtggtggtccttgccagtctttcgcaaatgcgacagtactccatccttcaatcggacgacatttttcttgtcccacatagtgagcccaaccgccaccattcacaccttgacagccacataacataactaagtttaagattgaacgataaatcgtatctgagttaaaccaatggttaatacccgcacccatgataatcattgaacgcccttcagtatcgatagcgttttgcgcaaattctttcgctacttgaatgacaacactttgttttacgcctgaaatggcttcttgccaagcaggtgtatattttgattctgcatcgtcgtatccttttgattctaatttatgatcaaaacgacgcacgccatattgacttgccattaagtcaaaaattgtagcaatacggactttgtcaccatttgctaaagtgacttgtcgagttggaattggacgattgaatatcccatctccatcactatcaaagtatgggaattgaattgtttctaattcgtatccaccttctgccattgataatgtagggttaattttagaaccatcttctgtttctagttttaagttccacttcttaccttcttcccaacgttgacccattgtgccattaggtactactaaactatcgctgattgcatcatgaataactggcttccattcgccttgctctgttgtttgacctaagtcactcgctcttaaaaatcgacccgctttatatccattttcatcttcatccagcatgataagaaacggcatatctgtatattgtttagcgtaatttataaagcgttcattaggttgattaacataatgttcttgtaaaataacatgtgtcattgcttgagcaattgcagcatctgaaccaggattcggtgctagccagttatctgcaaatttcacattttctgcgtaatctggtgctactgaaatgacttttgtacctttatagcggacttctgtcataaaatgtgcatccggagtacgtgttaaaggtacattagagccccacataataatgtatgatgcgttataccagtcacttgattcaggcacatctgtttgctctccccaaatttgtggagaggcaggtggtaaatctgcataccagtcataaaaactaagcatttcaccaccaagcaaattgatgaatcgagcacctgctgcataactaatcattgacatcgctggaataggtgtaaatcctgcgattcgatctggaccatatttttttattgtatacagtaattgtgctgcgattatctctgtaacgtctttccaatttgaacgcacgtgccctcccatacctcgggcttgcttatattgtttggctttgtcttcattttcaacaatagacgcccatgcagcaacgcgattaccatagttttcttctaatgcttcagtccataaatcccagagttttccacgaatatatggatatttgattcgaagcggactgtattcataccaagagaatgacgcacctcgtggacatcctctcggttcatattcaggcatatccggaccacaacttggatagtcagtttgttgattttcccaggtaatcacaccatttttcacaaatactttccaagaacatgagcctgtacagttaacaccatgtgttgttcttacttctttatcgtggctccaacgttctctgtacattttttcccattctctacttttactttctaggatcgaccaattcccattaaatttttctgttggcttaaagaaattcaatccaaattttcccatatttatatcctcctacgtataaaaatacgatgtgtagatgtcgtgtttttaaatactttaaaatgcccaagactattgctttaattagattgtacattttttcacaaatataaaatattagggaatcacctaattacttaaggaatttccctatcaataacgggatttcattgaaataatacacaatcatgtatggtcgtgcttattgccaatctaaatcgttcaaatttggcacaacgacaaataaggcttcaacacgaatatattctctcggttgaaaccttacttattcatttattttttataaattagtgacataacactgtattagcatctgcacgatcggttgaaatatatgttacattttcttgctgcttaataaatgcatcatagtaatcatattgcgacgaatgatatgtgccattcgatgtatcatttgggtttagcaaacagccataaccttcgtcatataaatgttcacagagcataagggcgtcatgtctagaaccacttactacataaaattgctgagtcggattagaagttgttgagacattttcagtataacccactacttcgcctataatacatatacctggtttcgcctcaattgcgtaatgctccagtttcccaacaatattacttaaacgccccttaacaacaaactcgttaaaacacgatgcttgaaagacaatcgctatcggataatcaatatctgtgtactgttgtatctgggcgataattttccctaaacgtttaactcccatatatatcgccaacgtaccaccatttactaaagcgttgacatctacttcattttcttctgaatctttaaagtgacctgtagaaaatgtcacactcttagcaacagcacgcatcgttaatcctgtttgcatcgtagcaactgcagcactcgcagatgtcacaccaggtacaatttcaaacgcaatattaaagttgtttagtgtgtcaacttcttcttgaactcgtccaaatattgctgggtcgccacctttaagcctcacaaccttgttatatcgacgtgctgcttccacgatacattcatttattttttcttgctgaatgtgttttgcatacggctttttaccaacatcgataatttcagtagtcaaattcgcatattgtaaaattaacggattcactaatcgatcatatagtataacatccgcttcacgtattaaacgctcagcctttttagtcaaataattcggattacctggtcccgcacctatcaagtaaaccttgccatatttatctacagacatatatatacgttcccgtctgtaacttctacctcataaacatctacacaaccttcatcaggttcttgtacaatcccagtatttaaatcaatcttttgatcatgaagtggacagaatacatattcaccactcactgttccctctgacaatggtccttgtttatgcggacaaatattgtgaatcgcgtgaattgtaccactttcagttaaaaacaatcctacctctttgcctttgacaataaccttttttccaattaggggtgttaattcatctatagttgtcactttaattttttcttttgtttccatgtattacaccttctccacttcaaaaattttacgtgcttgcgcattgctagttattgcttcccaaggttcagcttcgactgcttttttagcatccataatgcgttcaaatagttcattttgtctttctgggtcaagtaagacttcttttacattttcaaatccaagtcttcttaaccatggcgctgttctttcagcatatatacctgtttcgcgataatattgcatcaaagcaccacataatttgattacttcatcttctgtttctacagttgttaaaaattcagctttttcgacttctgtaccaccattaccaccgatatagatttggaatccattttcaactgagataataccaaaatctttaacacctgattcaacacaacttcttgggcagcctgatacacccattttgaatttatgaggtgtatcgatgtattcaaatgttttttctaaacgaatgccaagtcgtgtcgtgtattgcgtaccaaatcgacaaaactctttaccaacacagcttttaactgagcgtgttttcttaccataagctgatgctgaacgcatacctaggtcttcccatatatttggtaattcttcttttttaactccatacaaaccaacacgttgcgaacctgtcactttaactagtggcacatgatatttcttagccacttctcctagacgaatcagttggtctgcatctgtaacacctccacgcatttgaggtataacagaaaatgtaccatcattttgaatattcgcatggtaacgttcgttagcaaatcttgattctctttcatcttcatgatcatgtggataaaccatgtttaaataatagttgattgctggtcgacattttggacatccacctttatttttaaagtttaaaacatgtcgaacttctttagatgtttttaaacctttcgctcttatttgcgttacaatttgatcgcgtgtcaaatcagtacaaccacatataccagcaggttttgcggcaacaaagtcatctcctaaggtgtgctgcaatatttgagcaatttgcggtttacatttaccacatgaattccccgcttttgttttagccgttacttcttcaactgttgtaaagccattttccgtaatcgcatttactatagtacctttatcaacaccattacaaccacaaattgtttcatcatcagccatatcagcaattgatagcgatgcctcttctccacctttagtaagcaatgatacaagtgtgtaatcttcagtggattcaccttttttcatcatgttataaaagcgtgaaccatcatcgatatcaccatatagtactgcaccaactacattaccgtcttttaaaaagatttttttatagttattatcaacactattaaatatttcaatacctttaatttctgcattttctacaatttgaccagcactatacaagtcacaaccagaaacttttaatgacgtaaatgttgttgatcccttgtatccgttcgtttctttatttgttaaatgatcagctaatactttaccttgttcatatagtggtgcaacgagtccataaactttgccgttatgttctgcacattctccaactgcatatacattgctatcacttgtttgcatcacatcattgacaacaataccacgattaacatctagacctgattctttggctacttctgtgtatggtcgtatacctactgccataacaactaagtctgccggaatctcgcgtccatcagccaatttaacaccttcaacatcatcttctcctaagatttcagttgtgttggcttgcatttcaaacttcataccttgcttttctaaatctgctttaagcatatttcctgctttacggtctagctgcatttccatcaaccattcagctaaatgtaacaccgttacttccataccttgatctaataaaccacgtgcacactctaaacctagtaagcctccaccaattacaattgctttctttttagtcttcgcaatgttcatcatttgttcagtatcatcaatcgttctccaaccaattacactcggtaatgtcgaacctggaactggaatgacgaatgctttagaacctgtcgcaaaaatcaatttatcgtatgatacttcaataccatttgcagtagtaactgattgatttgctctatctacttcaattacaggatcattggtaattaactcgataccatgttcctcataccactcatatggattcataattgtttcttcaactgtcattttattttgtaaaatatttgaaagcatgatgcggttatagtttggataaggttctttacctattaccgtaatatcatataaatcgttggcgcgctctaatatttcttcgattgttcgaatgcccgccataccgttaccaatcattactagtttttgctttgccataaaatatgcccctttactccataatatttatttcaaaaaaaggtattaatttttcgttagtgcttttatattttcatcggaatcattaagctttctaatctatcgttaatgatttgctttaaaattgggtcgaagttaattgaaggtgtgaagtgtatatctgtattaataaccatgtcattcatttgctgcttcactttgttaacaagtcttccgtcatataaaaataatggtacgacaatcaatttttgataccgtttcgagatgctttctaaatcatgtgtaaaactaatctctccatatagcgttctcgcataagtaggtttattaatctgcaaatgttgagcgcatatttgtaactcttcgtgtgccttagtaaaatttccattaatattgccgtgtgcaacaaccataactccaacttgttgttcgtcacctgctaatgcgtcacaaatacgttgttcaattaatcgtctcattaaaggatgtgtgccaagtggctcgcttacttctacctttatgtctggataccgtcgtttcatttcatgaacgatattcggtatatccttgagataatgcattgcactaaagattagcaatggtacaattttaaaatggtcaaccccactttgaatcaacgtcgtcattaccgtctctaaatcctgatgctcactttctaaaaacgcaatatcatagtgatgtatatcatcttttactaattcagaaataaatgcttctaacgcttgattctgtcgtccgtgcctcatgccatgtgcaacaatgatattcccattcacatttaccaaccctttcacacgtattgtataccaaatcattttgtttttgtgaaaagaatcacattataatgtaaaatcagggaattccctgatgcctgtagtcatgcatattccttatacattttccctttttgttaaatcaaaaaaagcgaccgatatatgaatccctactcaacatttatttgagcaagcatcaatatatcggtcgcttgtagtgtatattattatcttaaaatggtggttggcctaatattgtttcgtcaaagcgctcgggtatcaatactttgcgcatgatcacacctaaatcgccatcatcattttcatgttcgctgtatatttcataacctcttttttcataaattttaagtaaccacggatgcaatcttgcagatgtacctaaagtaactgccgctgactttaacgtatctcgcaaaaatgcttcttcaacataagtaagtaattggctaccatagcctttcccttcatactcaggatttgtcgcaaaccaccagacaaaaggatagcccgaaatacttttcacacttccccaaggatatctaaccgtaatcgtagatataatttcatcatcaattgtcatgacaaatgtagtatttttatctatattttctttaacagcatctaaattagcattaactgaaggccaatcaatacctagttctcttagaggcgtaaatgcttcatgcatgagttgttgcaatttttctgcatcttgttcacttgcgagtcgaatcatcgtttttgtcatattaatccccactcttttttaaatgatttaaccatattttatttttaaaataaatatccatcaaagtgtatcaataaatttatcacatgtcagaaagtatgcttcatctgaatacaccaatactctcatgaaacttattaaaaattactctctcaacgtaaaaaaaccattcaaattcatgaatggtttggaagaatgattcattgttacgctatttaatcactacatcttaattattgttgctctaaacgattacgcttaccatttaagaaagcataaacgagacctacaaaaataccgccaccgacaaagttacctaagaaagcaaaaacgatattttttaaaacatgtaaccatgaaactgcatcaaggttaaagaataccatacctgcatatagacctgcattgaacacaacgtgctcatatcccatgtatacaaagaccacgacaccacaagctatgaagaatgcctttgttaagccgcctttgaattgcatagagatgaaaataccaatattaataaagaagttacagaaaataccttttgtaaaaatattcaaccatgttgaatcaacagtctttttctgaactaaagctgttaaagcttgtgtcatttcaggtgtcatgacatgcgcaaatttcattaagaaaaataacacaaacccacctaaaatatttcctaagaaacaatataataaaatccaagtcatcttcttaacagaaacgactttataataccagcctactgtaaagtacatgaagttacttgttaataattcagagttagttaatacaactaaaatcaaacctaaactaaacgcaatggctcccattaaattgataagtccatctacgtgagtattcgcaaactgcgtctttattccgaacataaatacagtaacgattgagagtaaaaatccggccatcattgctttaagcatatatcggccaggtgtttgctgtaccattacttgcttcatttgtactgaagatgatattgaatcaacaattgcgcctgttgaatatgtatcttcaactgttttcttattttctatcacagtacttcccccatttactttgatcaaataaaatttactttctaattatattagtaaatcaatgtaattgatagattaaatttcagaaaaatctttttattctctcaaaaatgtagttttctttcataaaaacagcgagataaatcgcgtgattggctaatatctttatgatttaagatattacgacgctcattttatctcgctttatgtaaagtattacttattcttttttaaatttgaaaagtaatgtaaaccatatgcaaatatactgtaaccaattgcagtacgtaaaataaaccttataactttattaggtacacattttgacgttactgaaatagaagatagtagtgttgtgaaaatatataatattaaaactttgatataacgttctaccatcgaatcatccctcatttttataatattacaagattattataaaccgaatgaaacaaaaaagtttttacatattttcaacaactttatttcaataaagcatcaagttgatctaaagtttgattcataccttgttcaacacccatgtttatgacttgttgagcggcttcttttgttggaaataccgatgttgatgtcactgtcgttttcgttgtattgctcttggaaaatgacaaagtaattttcatgcttggcatttttgtatcttttgcaccttgaggtgtcgcaaatgagtcaatatattcaattaaatatggacgcttaaccgttttatattctgctaatgtatagctggtcattgtaggtgttttaatcgcataaaatgcatcaccgcctgaaacagcattaaagcgaaatacttttgtgctagccccttttggatgaaaccatttttcaaataattcttttgtcgtataggcatcaaacaccttttcaatcggtgcttctatcgttcttgaaaaaataattttattatcttcaactttaatcgtcatcttcccactccctatcttttatatttactcatcttaacatgcattgagtaacatatgttaccaaaccatttgttataaactatagtaatattaatcattccctctgttgaaattgataactacgaaataaaaaacacactctattcagctattaacagttgagtagagtgtgcaaacctgttgaattaatgtgctaacatttcttctttgatttggtctttatttaattttgaaggataatatgttggccagttatccatttcttttaataacgcgtcattatcattacccataaagatatggaagtgttctgcctttttaggtgcaatgttgtgatcgctaaattggatgaatttcggtaagtctttatcattaccatcgaccaatttaaacataaatctcacgccacggttacctttaggatatttcaatgttttcttaccattgtattcatatttaccagtgtgtttcttaccatctttagtaaatgtaatttcatttccttttatatcaatgttagtaatatcagttttatatcctttgtcataataagcttttaaatctttagcagatttcttcggatcattttcagctttatgttccatcacttcatcaagcgtaccgtcttttaagtaagggtaaacagattgccattcaccagcataatcgcttaattcacggtctttaacttgctcatctttaaaatacccatcagaaattgctttatcgtgtttactttcagctttgtcgtctttcactttaacaccactgtctaaagctttaccgatattttcaatattcgatttcattaatgattgatacgtaatattatcttttttctgttgttctttatttaaagactccatgttgtagaattttaaaggcttcgcatctgtttctttacgaattgtttcagtcactttattcgcaacattatcttcgtaaagaatatatttagcattgctatctctaatttctttaacaattttagttaattctttttgtgatggatcttcagcattcatattttgaatacctttttgaacaaaaccataacgatcagctaagtatccaattgattcatgtgaaataaatactgcattaccttgcttatcttttgtaacttgcttcatatcgttatcaattttcttaagatcgtcgtttaattttttgtagtttttctcatagtcatctttatgttttggatcttttttcactaattcatctttaatttctttagcgaaagtttggttaattttaggatctaaccatacgtgtggatcatatccaccatgatgatgatgttcttctttctcatgatcatgcccctcatgttcatgctcttcaccatgctcgtgttgatcagttaaaagctttgctttatctaatttatcctctaaagaccgttttttatctttatctttgatagtagatgcaactttcttagcaaccggatctaaattatcccctgtatacataaacaagtctgacttgcttgcacttaatatatctttttgtgttggttcatagctatgtaaatctgtccctgctggatagattgatgataccttcacgtgttttccaccaatttgctctgcaaatgattgcaatggataaactgtcgttttaattgttaccttgccatctttatcttttccatcatcattcccacatgcggctaatgataaagttacggctggtacaagaagtaacatacctaatttctttttcatagtcaccctcctaaatagtaatctttacgttttaaaattatatactcatgctacttaaaatacaagcactgtttttataaataatataaagtcgaatcatactttaggtatttaccacttttcgttttatctaatacatgactattgtacaaatatgatacagaaaactttatagtatttacgaacgtcataatataagaaaaaaagacaatctctatcatattgctaatagaaattgccttttcatattgtcctaaaataacttaccctatttttatagtgtgacttttatatttaataatggtatttacatgatgctatttttatatgattgtcatctactgtataaaccaatctatgttcgtgattgatacgtctactataatacccagtcagattcgattttaacttttcaggcttacctataccttccaatgcaccatttctgtcaatacttttaagtaactcattaatcttcttcaccatttttttattgttctgctgaaaatacttataatcttcaaaggcttgaggcgaaaacgtaatatttaacctagccattatacatctatatctttcgttatagttttcccacgttctagatctgcaattgattgagctaagtgttcagcattatttgggttctgttggaggtaaagtgtttccatcatggagttataatctgattctgacatgattactacgtttttatcatcagtagatgttacagttaccatatcactatcatcatttacttttgtcataagtgcctttaaattctgtcgagcgtatgaataatttttaataatcatatttatcgcctccttttaacacacctcaattgtacaaatatctgtacaataaaacaagcgacacagaaaaaaactactaatcaagatttcgcacggggaagaatcaatacctatcctgtactgattccctactaaacaatgtttacatgataatttctacctatttagacttcatacattaaaaagacaatctctatcatatcgctaatagaaattgccttttcatattgtcctaataaattgatatcacttacttatctcaacaattaagactattttattttatcttttaataacttctcataactttcataatcatatggatcttcaactttctcgccattaataaatgcagttggtgtcgtttttatatgattatctttcgctatttttttatctttctctgcagctttccaagacttgctatcttttgtcttgtaatcttttataattttattttccgtctctttatctaaatgcagttgtttaatatgtttatctaatagttcttttgttaaccattctttattttcatcttgctgggcagcaaataattgcttttgaaaatctaaaaatgatttaggtgcatacatcaatactgcatgactcgcacgcgaaccaacaattgagtctttacctaagaaagctaaattgacaaattggtattccactttgtgattatctatataatttttacgcaactttggcatgactttttcatctaattctttacaataaggacatttatagtcgccatatatgacaactaatggtttgccgtttttcgaggatgtcgttgctgattcttttttaccgcaagctgttaaaattaacatgctcactataaataatgttagtaattttttagtcataataactcctgttcatatctagttcgtcatattttcttcatgataatccgcatcatgttgttgataatatcgtctcgaatcaaaatcttgcttatatgatacacgtttatcactaaaatcatatgcataataatgcacttcatcatcattactcaaaggtttataagctaaaatgataattttatccttatcatagacataaatattagcatctttgcgttcaaaatgatcaacacgatcaccgttgccttttttggcaagttgttcttgtttttgattttgaattttaactgcttcatctatttctttcacatatttatcattaccacatcctgatataaagactagtaataataataccgtcgccacaaatcgcttcaatgctcccactcctactatcaacttccaactaactttcaatataattaatactatacaccgtcaaacattaatgcgctacaactactaccaatgcatttaatataaatatccaaagaaataacagttatgtatagtcaaagaaaaatatatttcattttctatgtgtatttgtaatcagtttttgataaaataaaaaaatagcattattaataaattcaaaaattacagttcaattcagagagggatgggataaaatgaactttgtaacgttgacttcggatgagttcaatgcgtttacaacaaagcatttttcacattacacacaatcagctattcattacaatcatagagttgatttaaaaggcgatgtgcatcttgtaggggttaaagatgacaatggtcaagtgattgcaggatgcttattgacagaagcacgcacacttaaatttttcaaatatttttatacacatcgcgggccagtgatggattatacaaatcaatcattagtagcatttttctttaaagcattaacgtcatatttaaagaaacacaattgtttatatgtccttgtagatccatatttaattgaaaatttacgcaatgcagacggtgaaattgttaaatcttatgataaccgagcatttgttagaacaatggataaattaggttataaacaccaaggtttccctgtaggttatgattcaatgagccaaatccgttggctgtcagtgttagatttaaaagataagactgaagaccaacttttaaaagaaatggattatcaaacgagacgtaatattaaaaaaacatatgatattggtgtcaaaactaaaacgttaacgattgatgaaacgcaaacttttttcgacttattccatatggctgaggaaaagcacggtttcaaattccgtgagttaccatactttgaagaaatgcaaaagttatacgatgaccacgccatgttaaagttggcgtatattgatttaaacgagtatttaaaaacgttacaattaaagcaacaacaattaacagctgaactctcaggtgttgaagaagcattggaagaaagtcctaattcaaagaaaaataaaacgaaacgcacacagctagaacaacagctaaatagcaataagcgtaaaatcgacaatacaatagaacaaattgaacaagatggtgcagtcttaaacttagcttctgctttatttatctacaatgagcatgaagtttattacttatctagtggttcaaaccctaaatataatgcttatatgggtgcctaccatttgcagtgggaaatgattaagtttgctaaagcgcatcatattgatcgctataatttttatggtattaccggtgactattcagagtcatcagaagactatggcgtccaacaattcaaaaaaggttttaacgcacatgtagaagagtatatcggtgactttattaagcctatcaaaccattactatataaggtacaaacgtacttaaatcataaacgtcgttaaaatatcgctccaagattatgacaacataacaaagaaccacgcatcatgtatatggcatcatcaccatactaaaacatgatacgtggttttatttgattattcttcatttataacatttaagaaacgtcttaattcttctgttttcggacgattgaacatctcttctggagccccttgttctccgatcatgccttcatgaataaatacaatgttattagatacttcttttgcaaaacgcatttcatgtgtcacaatgaccattgtcatgccttcattagccaaatctttaataacctttaaaacatcattcacaagttcaggatcaagtgcagatgttggttcatcaaacaacatcactttagggttcattgctagtgctcttgcaatagcaacacgttgttgttgaccacctgataatgcatgtggacgttgatctttgacatgtgttaaaccaactttctcaagtaactcaagtgatttcccacgtgcctcatcctttttcaactttttaactgtgataagaccttccattacattttctaatgccgtcttatgcggaaaaaggttataactttgaaataccatgccagactgtttacgaacttctatttgtgattttttatctttagatgtatatgttttgccgttaacataaactgtaccttcagttggaatttctaatgcattaatcatacgtaacaatgttgttttacctgaaccagatcgaccgattaaggttacaacctcaccttgttcaacagataaatcaatacctttgatgacttcaacatcattaaatgatttatggatattgttcaattgaatcatgagcgataccctctttcaatataagattcatagataccttggataattgaaataataaagcataccacccagtacattagcgcaactaacacataaattgttaaatattcatatgttgtagacgcaacttcttgagcttttctaaacatttcagccactaaaataaatcctaataatgatgtatctttgattaaacttaaaaatgtattacctagtgcaggaatcgacactcgaattgcctgcggtaaaatgatacgttgtatcgtttgaccatacgtcataccgatggaatatgcagcttctgtttgtcctttcggtatagaaataataccgccacgaataatttccgaagcatacgcacctacatttaatgataaaccaataatagcagccactacaggtgccaatgtccattggttgtcagcgtcatttgttaataatctacctaattctggaataccataaaatatgataaatagttgtactatcattggtgttcctcgaataatagatacatagacacgtgaaatacttcttaaaattttactcgttgaaattcgcattaatgctgtaaataatgcaataatcaatcctaaaacaaatgtaactaatgtaataggaattgaatatttgaccaaaccttctagcataggtccgaaagcttgttttgcagcatctagcgcatgttgttgttcgctatttagatttagaaacatcttgaccaaaccatttcttacctattttagctaattcaccgttttcctcgatttttttcaagccatcattgaatttttgaactgtttcatcatctgcttttttagaaaatgcaaatgcagatctactttgttcagcattacctttgattgctttgatcttagcattaggtttttgttttttataatccaagtatgacagactatcattaaatgtaccatcaacacgcttagacaataataaatccattgattggttaaagccatcaacttttgtaatatcagcacctttatccttagctaatttaccataattagatgtgaatgtttgtgctaacttcttacctttaacatcatcaaaatctttaatatctttttcattttcacgaataactaaaacagcacttgagaatgtgtaaggcttagaaaatttatatttcttttctctatcaggattaatacctacttggttcgcgattacatcaaaacgccctgcgtctaaacctgcaaacatagaatcccaagaagtttcattaaatttaagttttaaaccttcttctttagccactgctttaataacatcaatatcgtaaccagttaatttaccatctttatcatggaaactaaatggtgcataagtcccctcagtaccaacattaattgtcttgctatctttattagcttccttgtctttcgacgaattgtttccacatgcagccaatatgaaaacgaaagctatcatcacaaataaaagtcttttcatagaatatatctccttattcttattattctaatcggaataaaaatattttaatctgaaatgccggataagtcaatatgttgaacttttgctaaaaagctttatatagctagcaacttatatttattgacgagaatcaacttcttttttcttcccttgtaacataaatgaacaaaagaaactaacaactgtaatcaataatgcaaataaaaatccagcgtgataaccatgcaacatcgtatcaactttaatttgattcatcatatcaattttgttcatgccattatagtctgacatagttggagaaaagtttttgcttgcatgagataaaatagtaattaatgcagctgttccgatagaaccagcaatttgttgtactgtgtttgtcatagatgaaccgtgtgcattcatttctggctttaattgattcatcgtatgggtcattactggaattaatcctaacgcgataccaaccattcgaatcgcataaactgttgccaacatgattgttgatgtttgttcatccattacaacaaaataagccgtagtaataacaacaatcgccatacctactaaagcaagctttctaggaccaaacttttcatataaagcacccgaagtcatcgacataaatgccataacaattgctcctggtaataaagttaatccagaatctaaagctgaacgatgcaataaattttgcacaaagataggtaaaatcgtttccgaaccaatcatcgataccattgtgacacccataataatgataccaactgtaaattgtttatttttaaatacagcaaaatttaataatggtgttgatagccgatattgacgtaatacaaataatgcgactaaaacaacgcctccaatcatagatactaatacgataggattatcaaaacctttttctgaaattgaactcgttccatacaataacccgccgaaacctagtacagaaaaaatgacagaaataaaatcaataggtactttaattgtagttccaacattttttatcgttttaaatccaattaaaaatgtaacagctgcaattggagcgacaacatggaaaagcgatctccagtttaaatattcaacaaggtaacctgaaagagtaggtccaatagctggtgctaaaccaattaccaaaccaaatatccccatatatttaccgcgttcatgcggttggaaaacatccaaaatcgttgtcatcatcaatggcatcataatacctgcgcctaacgcctgaataattctagcaactaataatgttgcaaagtgcggactcaagccgccgagtaatgtacctaagaaaaagatagaaatacccactaaaaacacttgtcttgttgtataacgttgtataacaagcgcggacaaaggaataacaatcccattagtcaataaaaaagctgttgtcagccattgaacttgtgtatatgaaatttcaaaatctttcataatacttggtaaagccgtcactaatagtgtttcatttaataatccaaaaaatccacccatcagcatagtaataatcatcgttaatttttgtttcttcgacatttaaagcttccccctcaccatctaaaaaacgacacacatttttagatatccggtaattatacccattttccaaaaaattagcacgactttattacaatttctttaaaacgtaatcattactatttacatatgagtagttatcggtcataatatatttacaaggagggatagagatgaaattagatttacagactgctcgtcgaaatttaaatagccctaacattaaaacaagaaagcgtgctttaaagattattaagcaacacaaaagagcgaaataattgttttaatttgactatattgtatgtctaactatattttcgagtatccctagctcgttaatataaactctatacttaactatttccttacattacttcacatatttaagagctgcatatacactcactccttgtgtacatgcagctctttttttataagtagtatttatctataacttctaaatcatccgttaattcataaacaagcggtgcacctgttttaatttcataattaatgatatcttcatctgacacatcttcaagatatttaattaatgcgcgaattgaatttccgtgtgcagaaactaataccgtttgaccatctagcaaatattgtgaaatatgatctgtccaaaatggtatcactcgaactaaagtatctttcagactttcagaataaggcatcatacgtttatctaaatgattatatcgacgatcagctaagtaagcttcacgttgttcttcggtttcagcaggtggtttcacatcataagaacgacgccaaatatgtacttgttcttctccaaattcttttctagcatcatctttatttaagccttgcaatccaccatagtggcgttcatttaaacgccagcttttatatacaggaatccattgttgtttagattcagttaaaatataatgcgttgtatctaaagcacgtgttaataacgatgtaaaagctacatcgatggcaatgttattttctcttactttttcacctgctctagtcgcttcattaataccttgttcagataaattaacatcttcccatccagtaaataagtttttagcattccactcgctttgtccatgacgacataaaattaattttggcataacttataacctctttcctttaatctttaggacgttatttcagggatattttaagatgatttaatcttagtaattttcttttcaatatattttaaaattcaatgattaaatcaattatcactagacattaaatacataaatcctattccccattttcattttttaattcataaatgaatcaataaccacctaataacaaatcatattatacacctttgttcgctatttttctaaggtttaaaaaatatttttaggtaagcctaaaaatagatgtaataaaaacgcctcctcagatatttatatatctatgaagacgtttaaatacattatagatggtctggttctgggtgaacgtatactgaggaaataccttttttgtgcaaatgatgttcgacattgtcacaaatttgatgcgcttctactaaggaaaggttagcatctacaacaattgtgacatcaataaacacactacttccatggtaacgccctttaatacttttaacttcttgtacttcatcaacttctaaaatatcattgcgatacgcttctaattcagtttcattgaaaccatcactcaacataaaaattgcttctttaaaaataccaaaaccagtataaacgattagtaagcctagtaatgttgctaaaataatatcgacaattgggaaaccgatttgcgtaaaaattaatcctatcgctgttccaatgctgactaaactatctgataaattatctttggcagccgaatttaaagaactacttttcgttcttttcgctagtctttgattgactgcaaatacaatcaacattacaagaccactgattaagctgacgataattgttattgcgttaggtacaacgtcatcttctttgaacaaacgaggtgcattttgaataactacttggatacctacaaacataatgacaaatgacaccaataatgaagaaatattttcagacttcaaatggccataaggatgatttcgatcggcaggtttaattgaaattttcaatccaataataacagctaaagaaacgataatatctgtcatattgtttaatgcgtcggctcttacagctgcagagttaaagacaaaacccgtgacatacttaacaatagataagattatatatacaattaaactcaaataagcaccgcgttgcgccaatttaagattttcattatgagacatgcgttgaaccaccttgaattagtatagtaacaatattatgaatgattcattttaattttacaacgtttttaatttttataaatttttataaaattaaactaatttattcattcgcaacccctaaaaataatttttagcctttcttcaaatttatttgttagaaaggcttatgcattagtagcgatgctatctaatgcgttcctttattttctgcgaattttatgagctagaaaggcttatgcagttgacgttttacgtccaactgcgttccttcgtcttcttcaaatttatttgttagaaaggcacccaactctccctgtttgttaactttcgtctcgaaagtttctatgttgggacccaatgcattagtagcgaagctatctaatgcgttcctttattttctgcgaattttatgagctagaaagccgcccaactcttcctgtttgtgaactttcgcctcgaaagtttctatgttgggaccctatgcattagttgcgaagctatctaatgtcgtgacctaattatatagaagaaaaagtgcatcagtgacaaattaaatgagatttctactctaccaaactctcttcgaaagacaatttcctcctctatttattagcaaactattgcatttctccatatagtacttccttacttaaaatacgctgaatgttctgaattaaacgcttttttacatagttaacactagttaatctattagttaacattagttaataattagttaatttccatttgtattctcatgtgataaattctaaaagcatacaataaatttaatatgtaaaaagaaagggaatacacatgaaaaataaatatatctcgaagttgctagttggggcagcaacaattactttagctacaatgatttcaaatggggaagcaaaagcgagtgaaaacacgcaacaaacttcaactaagcaccaaacaactcaaaacaactacgtaacagatcaacaaaaagctttttatcaagtattacatctaaaaggtatcacagaagaacaacgtaaccaatacatcaaaacattacgcgaacacccagaacgtgcacaagaagtattctctgaatcacttaaagacagcaagaacccagaccgacgtgttgcacaacaaaacgctttttacaatgttcttaaaaatgataacttaactgaacaagaaaaaaataattacattgcacaaattaaagaaaaccctgatagaagccaacaagtttgggtagaatcagtacaatcttctaaagctaaagaacgtcaaaatattgaaaatgcggataaagcaattaaagatttccaagataacaaagcaccacacgataaatcagcagcatatgaagctaactcaaaattacctaaagatttacgcgataaaaataaccgctttgtagaaaaagtttcaattgaaaaagcaatcgttcgtcatgatgagcgtgtgaaatcagcaaatgatgcaatctcaaaattaaatgaaaaagattcaattgaaaacagacgtttagcacaacgtgaagttaacaaagcacctatggatgtaaaagagcatttacagaaacaattagacgcattagtagctcaaaaagatgctgaaaagaaagtggcgccaaaagttgaggctcctcaaattcaatcaccacaaattgaaaaacctaaagcagaatcaccaaaagttgaagtccctcaaatccaatcaccaaaagttgaggttcctcaatctaaattattaggttactaccaatcattaaaagattcatttaactatggttacaagtatttaacagatacttataaaagctataaagaaaaatatgatacagcaaagtactactataatacgtactataaatacaaaggtgcgattgatcaaacagtattaacagtactaggtagtggttctaaatcttacatccaaccattgaaagttgatgataaaaacggctacttagctaaatcatatgcacaagtaagaaactatgtaactgagtcaatcaatactggtaaagtattatatactttctaccaaaacccaacattagtaaaaacagctattaaagctcaagaaactgcatcatcaatcaaaaatacattaagtaatttattatcattctggaaatcatcaatcaaaaatacattaagtaatttattatcattctggaaataatcaatcaaaaatatcttctctagttttacatcattttttaaataattttcgtaataaaccgtgattaaaaagaaccgctgattctcaatcgaatctgtggttctttttttattttccatcaattaaatgtttcttcgctatttgtcagtccacttctttacctgcaacttgttaaataatccttacatcgttaacgaatagttcatcatttagttgaatcagctcaactttattaacttcaaattttcacaaactattgcgaaatccattcctcttccactacaagcaccataattaaacaacaattcaatagaataagacttgcaaaacatagttatgtcgctatataaacgcctgcgaccaataaatcttttaaacataacataatgcaaaaacatcatttaacaatgctaaaaatgtctcttcaatacatgttgatagtaattaacttttaacgaacagttaattcgaaaacgcttacaaatggattgttatatatatgaacttaaaattaaatagaaagaaagtgatttctatgattaaaaataaaatattaacagcaactttagcagttggtttaatagcccctttagccaatccatttatagaaatttctaaagcagaaaataagatagaagatatcggtcaaggtgcagaaatcatcaaaagaacacaagacattactagcaaacgattagctataactcaaaacattcaatttgattttgtaaaagataaaaaatataacaaagatgccctagttgttaagatgcaaggcttcatcagctctagaacaacatattcagacttaaaaaaatatccatatattaaaagaatgatatggccatttcaatataatatcagtttgaaaacgaaagactctaatgttgatttaatcaattatcttcctaaaaataaaattgattcagcagatgttagtcagaaattaggctataatatcggcggaaacttccaatcagcgccatcaatcggaggcagtggctcattcaactactctaaaacaattagttataatcaaaaaaactatgttactgaagtagaaagtcagaactctaaaggtgttaaatggggagtgaaagcaaattcatttgttacaccgaatggtcaagtatctgcatatgatcaatacttatttgcacaagacccaactggtccagcagcaagagactatttcgtcccagataatcaattacctcctttaattcaaagtggctttaatccatcatttattacaacattgtcacacgaaagaggtaaaggtgataaaagcgagtttgaaatcacttacggcagaaacatggatgctacatatgcttacgtgacaagacatcgtttagccgttgatagaaaacatgatgcttttaaaaaccgaaacgttacagttaaatatgaagtgaactggaaaacacatgaagtaaaaattaaaagcatcacacctaagtaaacagttcaatcattttaaaaaatcctgggacacttcatacttgtctcaggattttttaacatattgaatcagcctcataacattaaattaatttatcgtacattaaatttaataataacaactgatttttataagaacaaagtatcgcaccagagtagatacacaaataatacaaatgaatccatttaagttgaaagcttaaataaatattctcaagttaataaataattaacttttagatggattcatcaaaaatcgtaaaaagaacaatttgtattttacaaacattaattaaaaataaaagcaagacattcgtgcaatcggttaccttaaattgtttacaactgtcaacaataccaaggttttattaactatatttctcacaaaattagcttttagcattccaaacaaaaaaggttaaattgaacggaattatggcatttttaacttaattgtaaaaaaagttgataatggtcaattgttaatgaacagttaattataataacgtccaaaatatattattatttaattaagttaaataaaattatagaaagaaagtgaaacttatgcttaaaaataaaatattagctacaactttatctgtgagcttacttgcccctcttgccaatccgttattagaaaatgctaaagctgccaacgatactgaagacatcggtaaaggaagcgatatagaaattatcaaaaggacagaagataaaacaagtaataaatggggcgtgactcaaaatattcaatttgattttgtgaaggataaaaaatataacaaagatgctctgatattaaagatgcaaggattcattagctctagaacaacatattacaactataaaaaaactaatcatgttaaagctatgcgatggccattccaatataatattggtttaaaaacaaatgataaatatgtttctttaattaattatttacctaaaaataaaattgaatctacaaacgtgagtcagacattaggatacaatatcggtggtaatttccaatcagccccatcactcggtggtaatggatcatttaactattctaaatcgattagctatacacaacaaaattatgtaagtgaagtagaacaacaaaactcaaaaagtgttttatggggcgtcaaagcgaattcattcgccactgaatcaggtcaaaaatcagcatttgatagcgatttatttgtaggctacaaacctcatagtaaagatcctagagattatttcgttccagacagtgagttacctcctcttgtacaaagtggatttaacccttcatttatcgccacagtatctcatgaaaaaggttcaagcgatacaagcgaatttgaaattacttacggaagaaacatggatgtcactcatgccattaaaagatcaacgcattatggcaacagttatttagacggacatagagtccataatgcattcgtaaatagaaactatactgttaaatacgaggtcaattggaagactcatgaaatcaaggtgaaaggacagaattgatatgaaaatgaataaattagtcaaatcatccgttgctacatctatggcattattattactttctggtactgctaatgctgaaggtaaaataacaccagtcagcgtaaaaaaagtcgatgacaaagttactttatacaaaacaacagccacagcagattctgataagtttaaaatttcacagattttaacatttaatttcatcaaagataaaagttatgataaagatactttagtacttaaagctactgggaatattaactcaggctttgtgaaacctaatcctaatgactatgacttttcaaaattatattggggagctaaatacaatgtatctataagctcacaatctaatgattcagtaaacgtcgttgattatgcaccaaaaaatcaaaatgaagagtttcaagttcaaaatactttaggctatacatttggtggtgacattagtatctctaatggtttatctggtggacttaatggaaatacagctttttctgaaacaattaattataaacaagaaagttacagaacaacattaagtcgcaacacaaattataaaaatgttggctggggagttgaagcacataaaattatgaataatggttggggaccttatggaagagatagcttccacccaacatatggtaatgaactcttcttagctggcagacaaagcagtgcatacgctggccaaaacttcatagcgcaacaccaaatgccattattatctagaagtaacttcaatccagaatttttaagcgtactatcacacagacaagatggcgctaaaaaatctaaaattacagtaacttatcaacgtgaaatggatttataccaaattcgttggaatggcttctactgggcaggcgcaaattataaaaactttaaaactagaacatttaaatcaacatatgaaattgattgggaaaatcacaaagtgaaattgttagatacaaaagaaactgaaaacaataaatagctagtaaaacacggtcgccaacagtaattgtgacgaccgtgttttgatttattatcttagtaagactgccattctttttctcaatgtgagatataaaggaatagctacaattaaagtgaatattacgcctggaatcgcgtttaacaacactacccacacaggtaaatttaaaataatagataatagtagcctagataccaaactgcctaatacacttgataaaactaatgatagtacatttattttcaataaataaacaactgcaatagctataactctaaatataatagaaataatcacattaattggattaaatacgccaaatatcagtaataatacgcttgataaaagcccacctaaaaagtactttttaattccaaagaaagctaatatcaataatgctgccggtgcagataattgaaaatctaatcctggtataatggacggtattttcaaaactgccaaaatggttaaaatcgcagcaatgacactaatttgagtaatatcttttgatgtcatactaaaacccctataccgtttcataaacaacttgcttcggtgtgctttctaaaaatgatatgtaatgatttaaatcaatacaatcgtccacaaatattattctgcctccatatctcgtattaactggtttaatatcaaataatcgatggtaaccaattttagcagcggcaaaataacctgtcgtatacgttaagtcatcggacacgcaaagttctcctttgacatacggatgcgcattgatacaactagcaattgctaaggcatcagtcactctttcattaagatcacctttattatttatatcttcaaacgaaaaatgtgttgccctaatccccctttgtccaaatgaatctaaacgtttaccagatatagcagatagaataatagctcctgtataaaccgtttcatttttaatatatgtcatcccttgatttagcgcttgttcagtgacaccacattcttgtgttaaatgttggagatttgctttatcatcctcaataatttgtaatgcttttatttgttgaatcggttccataattttttgtatttttatattgagaaaatccggttgcccattttcatgaaaaaaacctttattataaaacctttgtaccgtctgttctattttgtcaaactcacaaatcgtttcagcaccactaatatgaacatcttgattgctagaacgcatttttatactatacatgacgatcacctcaatcttcttgatgcaaaatttcaaacaacctatctatatcttgttcagtatgaaaatacgacaatgatattcttaacattggcttagtcacagttggataccttaaataacttgtaaacacatgatgctttaataatgtttgatgaatgttctcagccgcttctatgtcatcaaactcaataaacttaatcggcgagtttgaactattataattaacattgagtgcttttaacttttggttaaaatatttactcaaactatttaatttagtgcgtctatcatcagcatttattaacttttcaatgtttctttttataaaatacaaattataaattggcaaactacttgagtagatgagtggtctaccgtgattaattaacatatccttcacatcatttgaacttaaaatcacacccccgtatgcaccacatgctttagataaactagaagtgagtatatctacaccttgataattcgagtaattctctattccaaaactatgtgaaacatcgagtatcagtgttgcgttatatttatgctttaatgagactaattgaccaatatccacaacgtcgccattcgttgaaaatacactatcagatatgattatttttggtatattttgattagggtatttctctaaccttttttctaaatcagcaatatctaaatgcttatatatcactttttctaaaccacttaacttaataccgtcaataatactcgcatgattttcttgatctgaaaacacgacacaatttgtatttttgaaaatattaaacaacgccaaattagcatcataaccactatttaagatagtacatgcactatatccgagccaacctgctaacattgtttcaatttcttcataagctgtcgaacttccactaattaatcttgaacttgataagtgataactatacttccgcataaatctttcgaaatcatccttatcaaacgctatttgacctaatcctaaataatcattagatgtatagttcgtacatctcttattttctacttcaatatactgtctatctatataccctaccgatttaagcgaccgatataaccctttctgttgtaataaatcaatttgctcttgaaacatcattcttgttttccttattttcacaagtgtcataatcaatttcaaagcccaaatcattaatcatatcgtagtctaattggttcggttgcccaccagtaattagataatcaccgacaaatattgaattcgccgcttttaatgctaatggctgtaacgaacgtaagttgacctctcttcctccagcaatacgaatttctttcgtaggattgattaatcggaataatgctacgattcttaaacatttcattggtgttaaatcatccatgcttccaaactttgtgcctttgattggatgcaaaaaattaatcggaatactgtcggcatccatttcttttaaagcaaatgccatatcaacaatatcttgattagattctcccataccacaaatcacgccagaacatggtgatatattattcgctttcattagttctatcgtatctgttctatctttataactatgcgttgtcacgacgttatcatggtaattttcacttgtattaatattgtggttatatctgtctacaccagctgacttaagtttcttagcttgttcgtcattcgttaatcctaaacatgcacagatttttagttgcgggtgttgagatttaatcgttcttacagtattactaatatgatcaacttctttatcgctcggtcctctaccactcataacaatacaatatgttccaatatgattatcatgtgccacctttgctccatcgataatttgttcctctggaattaaagcatatcgctgtttttgtttaatatctcgtgattgtccacagtacccacaattctcaggacatataccacttttagcatttaaaatcatgtttaattttacttttttaccaaaataatgttttcttaaaatgtacgcctcatttaataaatctaaggtatcaatattagtatcctcataaattttcaatacagtctcttttgttaattgttccccttgtaatatgcgtttagccaaattcatattaacacttcctatctaaaatgttatgtactgcctttttaaaaatacgtaccatcgttttcacttctttatttgacatacttaacactggcacaaacgtaatgacattttctaaatttctaatcattagcccgttttctttacatttacgtacaatacgttcaactttttcaatttctaacggcgttttactatctttatctgtaactaattcaactccaaacattaagcctcgtcctcttacatcaccaacatttcgatgacgcttcagcgcatgtaactgtttctcaagtgttgatgatgtcgtttcaatatgtgacaataacttacgtttttcataaagtcttatattttctaatgcaaccgtacaaacgatttgatttccggtgtatgtatgaccatggaaaaaggtattaacaccatgcgaatcacttaaaaatgtattgtatattttttgagatgtcaatgtagctgcaagtggtaagtagccaccagtaatcgccttacctaaacacataatatccggttgaacatcttcatgattgcatgcaaacatctttccagttctcccaaaaccaactgctacctcatcacaaattaataagacatcgtattttttgcacaatttctcgacttctttcaaaaagcctttaggatgaacaaacaagcctgtcgcaccttgaatcaacggttccaatataaaccctgcgatttcatcatttctttcaattagaatttgctctatattcgttaaaatagctgtcataatttcattttcagtatcgtaattactgcgatagaaagatgggctttctacttgaatattctcaaatattaagtctttaaatattttatgaaaggtcttgataccaccaacacttaccgcaccaatcgtatccccatgataaccgtgatttagcgttataaacttgtttttcttggcatatttttctctatcaatatttttccaatactgatatgccatctttattgcgatttcaacagacgcactgcctgtatcagaataaaatacttttcttagattacttggcgtgatttcgattaatttttccgcaagttctattgacggaatatttgatgatcctagcagcgtagaatgggcaattttattgagttgctttttaattaccttattcaagtatttgttattatgaccatgcacattgacccacaacgatgcataaccatctaaatatttattgccattcgtatcgtaaaggtaactaccctttcctttttcaatgatgattgcttcttctttgctatatacacccatttgtgtaaatggatgccaaacatattctgagtctttttgtttaagttgttgtgtgtaattcatttttaactcctattaattgttttaaaaatgcttctgagaaattttcatacgtggcatgttcttcaaatgtatagactgttttatttgttaattttccaatcgtaatttgattgtctttttcaatatagctgtctgtatagcgattcattattaaaaaattactcgccgatacattcttattaacataatcttggtgaacaacggcatcgctaatagcacctaattttgatggcaacacactgatgacacaatctgcacaatcattgattagatctttagtcatgtagaaatcatctgtaccttcatatattggtacggcaattcccccagcaccctcaattaagataaaatcaaattccttatctaaaacttttaccttatctaatacacgctgcttatttagaaaaatttgatctgtcattttaaatgcaaggtgtggtgatacaggttgcttaaaagtataaagtgacgttatgtcatagcttaaatcacattcatttttaaatacttctaaatctggaaatgtcccgtcttggcgttcctcagtttgaaatggtttaaaaacacaaacacgatgaccacgtgttttcaaagcatggtataaatgctttgtaacataggttttgcctacatcagtattcgtacttgtaataaaaatcctcataaaaaataagcacctcaatccgaatgtaaacttttataattaataagtttacatttaaggcgcatgtttttcaagaaaacatgaatttaaacttctcagtataactataatttttggcaaaattttgaccttgctattgaaatgactaaggcttcttacgaaatttgggcagatataaacagcgattcgttaaaatatgtcagttaaaattaataattgcattatttcttaacaaaaagacatcctagctttaccatgttgtgaaacaatccattaattgtaatattacgttgagcgccttgttcatcaatgctataattagttacataataaattgaacatctaaatataccaaatcccctcactattgccctagtgaggggatttattttgctgttgattatctatcaccctttttatttccaaattctgattccatattaaactattatttataatttccagcctgctgatttactttttattcttataaagtcttgatacattcctggttttcgaattaattcatcatgactacctttttgaattatttcaccttcattgagcactataatctgatctgcatttttaatagtttcaagtttatgtgcaattgtaattactgttttgcctttacttaattcattaattgccgtttgaatcagctgttcattttcagggtcaatacttgcagttgcttcatctaaaataattattggtgcatcttttaatatcgccctagcaatagaaatcctttgcttttctccgccagataaattactacctttttcatttagcattgtttgatatccctcaggtaatgacatgatgaagtcgtggcaacatgcttgcttcgctgcacgaataatttcttctttcgttgcacctggattgccaaacaatatgttattttcaatcgtatcattaaataaatacaccttttgaaatactgcactaattttcgacattaacgtacttaatgtcatatctttaatatcaacaccatcgatgcgaatatttccatcatcgatatcataaaagcgcaagagtaagtgacataatgtagatttcccacttcctgaaggtccaattattgctgttgatgtttgtgtaggtatctcaaaattcacattctttatcacttgtttatcatcatatgaaaagttcacgttttgaaaagcgatattttcatttttaatcgtcaaattttttccattctcatccagttctggagcattttttatcttttcaatatcatctatcgtcatatctatcatttcaagtacgtgtgcagcactattaatattttcaacactatcaaatatcacaaatgaaaaaattgaaatcataataagggtaggtaaatcaatactatgattcatatataataagcatgcaactaatacaatcattattgaaacaacttttaaactaagtaaatgcaataaattgaatgggatatattgcatttctatttttgtatttatacgtttactttcattgactgcttggttaaaacttttaagactcgtattttctttcgcgaatgattttattacttgaataccacgaataacctccaataccttttccactaattggttttgtacattatgatacgctggcgcattttgtcgactctttctttctaataattgaatcgcaaaaaatgatagtaatacgccaatgcatgctaataatgatacttgccacgaaactacaagtagagacaatatgagtactgtaattaatatgtatccattaacaacaatatctaccattttcatggcaaagttttctagaaatgttaaatctgttgttactattgttgttaactcatttgaatgatgcgaattaaaataacctaaccttacatttttcaatttatcccctatatctaaacgttctttcgcactcatttcataagcgatgctctcatggcttttgcttttgaaatatgctgtaataaatcgtccaatcactaataaaaccatgataattacaacattcaatatatctttcatataaataggtttatgagatagcacattattaaatatttttgcagctaaaaagataggtaacgcaataaaaatagcatttaaaaatgacatgctaaatcctaaaatcattcttgctttatatggtcttatccagtttaaaattttaaatgtaatttgaaacatatttgacctccttttctcattagtttaattatgtccagtattgattccccaatcttttgtatgcatgtgcgtatcccacattttcttataattaccgtttaattttagcaataagtgatgtgaccctttttctaaaatttgttgtttacctaaaacaataatttgatctgcatgttgaatcgtagataaccgatgtgcaataacaatcaatgttttatcctgcgtcaacacatttaatgcttcttgaattttttgttcgttgtctggatcaacgtaagcagtcgcttcatctaatacaatgataggcgcatcttttaatatcattcttgcaatagtgactcgttgtttttcaccaccagacaatttatctcccactgtaccaacattcgtatcatatccatctggcaacttttcaataaattcatgacattgtgctaacttggcagctttttcaactgcctcatccgtagcttctggattgccaagtttaatattttctttaaaagtaagatttaataaaaagttatcttgtccaacaaaaccaactaaatcgttaagttgtttcgattcaatatcttttatatttataccgccaatcgtaatttcacctgaagtcacatcccagtatcgtgatataagcttggcaatggttgacttaccgctaccagaagccccgacgatagctgtgaaattattttctggtactgtaaatgataaatgcttaaagaccagatcgtccttatctttgttatatgaaaatccaacattattaaaagcaatttcataatgttgaggcttcttaaattttgttgacaatactaactcttctagacttaatatttgattcacttcagttaatgcgtattgtatagactttaaatgatttacataattagtaaaattcttaatcggtgctactacacctaaagataatacgatgcataggaaaaattccgcatagtttaattggttgatagatatcaaatacatgccgaccggtaaaatccctaaaaatgttgaaggtaatacactagctcctaaattcatatacccccatgtatttttaaaccaattcaaagtgtgaatcttataattatctactgcatctttatattttttatatgaactttgagattgattaaatgttttaatcacttcaatgccttcgataaactctacaatcgcgctattcatataattatttgatttcatttgttcagcatatgtctcattaaatccagacataacttttttaaaagcgaaaattgaaattggtatcgttactaataaggcactagccatacgccaatcaatgagcattatgtataaaaagatagcagctgacaaaagtaagtttcctataacttcaggaatcatatgtgctaaaggtaattctattgtttcaaccttatcgacaaatatattttttaattcacctattttcttagattccactacgcctaaagggaggcgcattaatttttgagctaattttttacgaatttcagataaaatttcatatgccgtaatatgtgatagcatcgttgacgctccaaaacaacacacttgtgaaatataagtgattaaagcaataaagatataaaccataatcgaattaatcgtatatgcattgttaatcatcattaaaataattttaaagactgcccaatatggaactaatccagaaaagacactgatgatagacaacaaaattgataacataattttccatttactatcagaagcaaatccgctgagtatctttatccaatttgtctgattgttcatcgtatatgcaactcctttcaattaataatctaaattaagccgcttatattatttatttcactggatgatatacataatataaatttgtcatttgttaaaaattaatacttattacaagtacatcatatattagttgataacgattatcaatgtcgcgtggatttgtgacacatttcttttaaaaattcacaaggttatggggcagaaatgataaagagccactaatgatttattatgtaatgattctttatccttagccacagctaatatgtacttaaaaataggaatacatgagtaaaactctatgttggggctccgccaacttgcacattattgtaagctgactttccgccagctactgtgttggggccccgccaacttgcattgtctgtagaaactgtggatccaaattctctatgttgggtccctgagtatagccttgtagagtctagtacattgatttgtatcccaatgtccctataattgattattcgctttatctaatgatcctatgactcaactattaaatcatttttcgaaatacttaattctaatataattaaattcatttattgtaatattgcaaaatacattgcacaccttgtttatcaatgctataattaattacataataaattgaacatctaaatacaccaaatcccctcactactgccatagtgaggggatttatttaggtgttggttatttgtcaccttttttattgttgcgcgttcgtaaccaatgtgcaaaaaacgcaacaagacagccgcttaaagctgaagtcatgatgttaattaataaattgaacatccatcatacacctcctctctgcgttaaagtaacgcccgagatgttaggcgaccattatattatatcatttatttattatatttcacgcaatattaaagttcgagtaaagcgttttttagtggtttacgctactttaattactatcttttaaaatccatttagataatacaaatgtgatgggtatcgtaatcactaaacctgcaaatggcgcaatttccgctggcaaatttagccaggatacaaaaacatataataaaactgtttgtaagcttacgttgacaatctgcgtaattggaaaactaatgaattttctccaagtaggttttaccctgtaaacaaaataacaattcaaataatacgaaatcacaaaagcgactagaaatccggtaatatgactaatcatatattcaatgtgtaataattttaacagcaataaatagacaacataataatttaacgtattaatgccgccaacaatgataaattttaaaatttcagcatgcgtttgtgttagtttcatatgtgtaactcctcaacatcaaaatatatgcatagctacgttctccaacatactcgaatatgcgagccaatccgcttcacttcaaatttacttatttcaacctttataccctttcacagcaaatttagtctctttcctctcatccttatacgccattataatgtaactgatttatcgcgtgactcattagcactatagagattactttagttcactagtaattttatatacaataagagcgacaacagtaatgagaggatgtctactatgcaattacaaaaaattgtcatcgctcctgactcatttaaggaaagtatgaccgcacagcaagttggcaatattataaaacaggcatttactaatgtttatgggaatacccttcattatgatatcattccgatggctgatggtggtgaaggtaccacagatgctttaatgcatgcaacaggtgccactaagtatacagtcatcgttaatgaccctttaatgcgacctattgaagcatgttatgcacgcgcagacgaacaacaaattgcaattattgaaatggcggcagcgtcaggtttggatttattagaaaaagaggaacgtaatcctttatacacatcatcatatggtaccggtgaactaattaaagatgcattaaatcatggtgctaagaccattattttagggattggtggcagtgcaacaaatgatggtggtacaggtatgctaagtgcactaggcgtaaagtttactgatgtaaacggggacttattacaaatgaatggtgctaatcttgctcacattgcacaaatcgatataaccaatctagattcgcgattaaaagaggtgacctttaaagtggcctgtgatgtttcaaatcctttattgggtgaaaatggtgctacctatatttatggtcctcaaaaaggcgctgatgcaaagatgataccaaagttggatttcgcaatgtcgcattatcatgataagataaaaatgtgcacaggaaagtccgttaatcaaataccaggttctggtgcagctggcggtatgggcgcagcattattagcgttttgtgagacaactttaacaaaaggtattgatgtcgtctttgacattacagattttcatcaaagaattaaagatgcagacctcgttattactggagaaggacgcatggattatcagaccatctttggtaaaacacccgtaggcgttgcgttagctgcaaaacaatatcatattcctgtcatcgcgatttgtggcagtctaggcgaaaattatcaacatgtttacgatttcggtattgatagtgcctattctataatctcttcacctagcactttagaagatgtcctacaaaatagcgaacaaaatttattaaacactgcaactgacattgctcgtattctgaaattacaataatgtcaaagtaaatcatcagctttattatttgcagttaaaacttgaatgaggtgaaacccatgaaaagaactgataaataccgtgattcatatcaatacgacaatcaaaaccaaaatcatcgtcgtcaatctgaagacgcatcgtatagacaacaatatgctaaaggcgatcctgaagaacacccggaacgatactataatggtagagattatcgaagagaacaaattcttgaagaagaaaacgagaaatcccgccgttcaaaaaaatggttatatatcattattgccattctcttaattattgtcgctatttttgtcacacgcgccttacttaacaatgatagcgataaagttagtaatgaccctaaagtctctcaaaattataaaaaacaagttgaaaatcaagacggccaaattaaccagcaagtagataatgctaaagaaaatattaaaaacaaccaaaaaactgatgacattattaaaaatttacaaaatcaaatcgacaacttgaagcagcaagaacaaaacaaagctgattctaagctaactcaattttatcaagaccaaatcaacaaattgacagaggcaaataatgcacttaaaaacaatgcaagccaaggtaaaattgaaagcatgttaaatgatattaatacaaaattcgacagtattaaatctaaattagaaagcttatttaaagatgacaatggtggcgctaattaattattacacctgctttgatgataaacattaattccctatactttatctgtatcactacgttattcgtgatgatgcattaagagtatagggattttttatataaacttgtattctaactacatacaaatacacacaaaacgtatataatttatataattatatcatttaaaggagtctgatcatgcaatcaacgaaaaccaaaacgaagcatttttcatttttattgctaattacgttaggcgtcatgaccgcttttggcccactaactatagatatgtacgtaccatcattacctaaagtgcaaggtgattttggttctactacatcagaaattcaattaacattatcattcacaatgattggtcttgcactaggccaatttatctttggacctttatccgatgcttttggtcgcaaacggattgctgtatccattttgatcattttcattttggtatcaggtttgtctatgtttgttgatcaattgccattattcttaactttacgatttattcaaggtttaactggtggtggcgtcatcgtgattgccaaagcctctgctggtgataaatttagtggcaacgcactcgctaaatttttagcatctttaatggtagtaaatggcatcatcactattcttgcaccattagctggtggattagctttatccgtagcaacatggcgttctattttcacaattttaactattgtggcactcatcattttaattggcgtcgcttctcaattacctaaaacatctaaagatgaattaaagcaggtgaattttagtagcgtcattaaagactttggaagtcttttgaaaaaaccagcatttattattccaatgctattacaaggtttaacttatgtaatgctttttagttattcatctgcatcgccatttattactcaaaaattgtataatatgacaccccaacaatttagtatcatgtttgctgttaacggtgtaggtttaatcattgtcagtcaagtcgttgctttattagtagaaaaattacatcgccacatattattaatcattttaactattatacaagtggtgggtgttgctttaattatcctgacacttacattccatttaccactttgggtcttactcatcgcattcttcttaaatgtgtgtcctgtgacgtcaattggaccacttggtttcacaatggctatggaagaacgaacaggtggcagtggtaacgcatcaagtttacttggcttattccaatttatcttaggtggcgctgttgcaccattagttggcttaaaaggcgaatttaatacatcaccatatatgattattatcttcattacagccattctattagtcattctacaaatcatttactttaaaatgattaaaaagcaacatgtcgcataacacttcaacataattagaaccctagcaaagatatctatctttgtcggggttcttctttatgaattatgaaatccaatcttcaactaaaattacgccttcatatcaagtacatttctattcaatcaccctttaacaggcatccaaatttctgtaatatatttttcacttgtagtatcaccatcctgatacaactcaaaaaatggtgctgattttaccgtatttgcttgatattgatgtatgtagtgatgaacctcttccattttttgttgaactgctttaggtactgcgccctgtgcttcaaataccatatactttgaacttgctaatgttatgacatcatattttgcaatatcagcactattatctccggtaactgcaatcatatatgacatcttaccgtctaattcgggtatacataagccaagtatcccggctaaatcaccattattttttaactgtaaatccgcaattactccctcttgataacacctttgccaaaacccggctatatgttgctgagcctgtcgtccattttcatacgtttctttaatacctactaacgttaacgacgcaagttgttgtaattgatattccattttatcactccattaattttattcactcatgtaaaacatatgtttaggacattttgcattgacgctatataattatattaaatatttattgaatcaatgcgaggactatattatgaaccgaaaaatattaccagttaaacctatcagtcagctatttcctatccctatggtcatggggtgtgaaggtgtttccgcagccatgatgttgcaatacaataaccaacatatccctgctacagaaattatgagacattggccgacacatccgaacaatccacataaaggttatgttggacatcacttattcattaagcttggcaattatcatcaaacgatatttccagaagcatatgtaccatttttacaaaaatacaatcctaatatcgtagacggcactggtaaatccttagaagatcttaaaggtattatcgatcaaggtcaacctgtgttaatataccatactaatcttggctctaaaccattactacgtgttttccgctttgataacaagccagcgaaacaagtttcaaatattcacgtaacgttactcattgggtacgatgattactattactattatatcgatccactttggagtcatattcgtcgtggcctagttttacctgccatcattccaaatcgcaaacaaattattaaaattcgtaaagagaaaatggaatacagctttaattcaccaggaagaaaatgcatttatgtgcaaccacattcatatacaattgaaaatcaacaacaaaataaacacacgtaagtaaacacattactcgcgtgtgtaaaacataaaatgcgcaaactgggtcaggtttgcgcattttaaatttctattatttgtatcgtctcatttatttcctggtaaatatcttctgaacgccattgtcttggatagcctagacacggacagagataacatctgccatcatccatcacacttttacgaaaatgaacatggcccataatactatatggtatatcgaacatcgcatacaaaggattgaaatcacttgtcccaataaatgcattataaaaatcgaatatacgatgtggcataggaacaatgaaatcagggtgcgtcacaacatgtgtgactaaaatcactcgtctatttcctacttctaatatatctttcttcacttgttcagccgctattttagataaattttgatctgatatgccccaagatattcgttctttatcttgccaagtcgcaccataatgttttcctttttgtaaatgttctaatgaaaatcgttgtgctgcaaagctataatcataccaacctgtatgtcctattattgcccattcttcatttactataaatggttttcctaccaagcactgtgacatgctcttataattattccaaatgtcttgcgtagtcatactttcaacttcccataaatcatggtttccaggaacaaatttcacaggtatatctaattgttttgtcaattgcgttataaattggtgcgtcaattgataatgatttgagatatctcccgcaatcaacaatatatccaatttcttatacttaactatttcaaccaatgcctctaagtaatcttcggatgtttttttattatgacgatcaatatgtaaatcggcgattgtccctatcttcatacccataccttctttactcaaattaaaatgttatttattatgccatagcttatctaatatatatagttaactgcttcatttagatgattattttatatttttgcataaaaacttatatcttttcaaaaaatcgataagttttagttatcatacccttacctatcaaatgttttttcttatatttaaaaaaataattgctttattaaatggatttctttagtatttataattaagaaaacgcttacacacaacttttttatttgctttatcctgaggaggaaaattatggcaagaaaattgcatagagagttgaataacagacacatccaattgatagcaattgggggcgcaattggaactgggttattcctaggatcaggtcaaacaatatctttaactggtccatcactgttattcacatacatgattattggggttgtactattcgcttttatgcgcgcattaggcgaattgttgttgagcaatacaagatttaattcatttgttgatattgcaaatgaatatttaggcccttttggtggctttgtcattggctggacttactggttatgttggattgtatcaagtatgtcagacctaactgcgatgggacaatactttgcattttggtatccacaagtcccaaattggattaccgtgctatttattgttttaatcttgattagcttcaacttattaggtgccagattatttggtgaactggagttttggttctctattattaaagttgtcacaattattgcgatggttatcgttggtcttgtattaatctttttctcatttaaaacacattatggacatgcatcattcacaaacttaatcagtcacggcggcatgttccctggaggaacatttggtttcctaatgtcattccaaattgctgtatattcattcattggtattgaacttataggtgtaactgctggtgaaacgaaagatcctgaaaaaaccttaccgaaagcaattaataatgtacctatccgtattttattattctatatcggtggtctattagtaattatgtcagtcataccttggaatgatatcgatccaaatagtagccctttcgttaaactctttacattaatcggcgtgccatttgcagcaggcgtcgttaactttgtcgtgctaactgccgcggcctctgctacaaatagtggtatctattcgaatagtcgtatcttattcggactgtcacaacaagggttaggtcctaaagttttaaataaaacgaatagtcatggcgtgccttatttatcaatattagtttcatcaattgcattacttatagcagccttgttaaactacattttccctaatgcaattcaactattcatatacgttacaacgttatcaactgtgttgtttttagttgtttgggcaatgattattgtcgcttatctaatgtatttgaaaaagcatcctgaggcacataaaaacagtaaatttaagttgattggtggtaagcctattgcttacattattctagcgttcttcttctttgtattcattttattattctttagtgacgaaacaagagcagctatttatatttcaccattctggtttatatttttatttttcttttataaaaaatacaaaacgaatgctgaaaagctcgcgtatgaacaacgacaaaatgacagcggtcatttcagatatgacaatcaataatttaaacatctcgctctagtatcagttcaaccgatactagagttttttttgaaaataacttcattttatcaatatatctatgtcattatgccttaaaagtgataaaatattaactattaaaattttgaggagtattgtatggcactattagaagcatttttaatttttatttttgctgtgattattagttcggttatcaataatcgattcccacaaattcctactgcctttattcaaattgcattaggtgtcgttattttcattattccaatacaagttgatttccaattcaattctgaagtgtttatgtttgccgttatcgcgccactactttttgtagaaggtacccacgtctctcgaacaaaattattagaatatcgtaaacctatactattaatgtcaatggcactagtgtttgcaactgtagtcggtgttggctattttatacattggatttggcctgccttaccaatgccagccgcttttgcaatagcagcaattttatgtcctactgatgcagtagcagtatctgctattacacgcggaaaattattacctaaaggttctatgacgattttagaaggtgaatctttactcaatgatgcagcaggtatcatttcatttaaaattgctgttactgcattagtaactggtaccttttcattattccaagctgttgaacaatttatcatttcaacaatactaggtgtacttattggtgcaattattggattcgttgtcgttagaatacgtatagacttaaccgctaataaaggtttaaaagataacaataccttaacttttattcaattattaactccttttgtcgtatactttttagcagaagaagttcatgcttcaggtatcattgcagttgtaatcgcaggtctaatccatggtttagaacgcgaccgtttaattagagcacaaacggaactacaaatgaattaccatcaaatttggaacacatttagttatgccttaaatggttttgtatttgttgtattaggttttatgattcctactgtagtcatagatattttccaaacagagcctgacaacttttcatttttaatagtgatcactatattaatcgctattgcaatttatgcatgtcgatttgtttgggtttatttctggtacaaagatttttatttcccgaaaaatatacaatcttatctagacgaagaacatgattcacatgaaacaccaccttctcgtgtgcgttacgcatttattatgacgatgtgtggtattcacggtacaatttcactttcaatggcacttacattaccatttatcattacaaaaggacaagcattcgaataccgtaatgatttattgtttattgcatctttcatggtattaattagtttaatcttagcgcaaattgttttacctttaattacaccatctgccgaagatactacttttaaaggtatgacttatcaatctgccaaaattttcattgttcaaaaagtgatacagcattttaaaaacgaaagtaaaaaagacaaaaacgatacaaattatcgcccagtattaaaccaatactatggagaattgttatttttattaaattcagaacctaataatcaaaatacaaaagaactcaaacgtttagaagatattgcaaaagtaatcgaaacatctacacttgagcgtttaattgataaaggtaaggcaacgtatcaggatattaataattaccgcaatattgtcgaattaacagagacacaccgtactgcatcatttgttgaaaaatttgcaaacttcttcaagatgttatggcttagacttaaagcgatgaagcactacaaagccttaaacaaagaatctaagaagcaagaatttgaaaattcattcaaagatgttcaaaaaattatgcgtattgtgaatcacaatattattttacgcttaaaagaagaacaaaatagtacaaatgtacttgaggttagcttagtcattaatcattactatgatatgagtcgctcattaaagtggcgtgcacaacgtcgaaaagaacgtcaagaaaacagcaatcaaatcataccgcaagctatgttccataaccacaaattggaagcattgtacttacaacgtcaccttttagatgaattaattcgcaaaaataaaatcaacaatatcgttgcagctcaaattcgagaaaatatcaattacaacgaaattgtcttgtctttacagtccaaacattaagcaagacataacaataccccccatacatatgagacaaagtcattatcatctcatatgtacggggtttttatattcaacatcaaaaaatcggattgatgaaaagtaaataacctttcatcaatccgatttgattatagaatctattttttaagtttaaatggaattgtacatacgttaacattcttttgataaattaaatacaatttcatacgcaaactagtttgattgtgtaataaattatgccaacgtttcttagtaataaattctggtatcactactgtaatcatatagttttgatcgtttgctttacgattaatcttatcgataaaacgtgaaattggtcgtataatactgcgatattccgaatgtaaaataactaatcttacatctgggaaatgacgtttccatttctcttggaatgctttttcatcttcatctccaaatgatacatgtactgctatgacatcattattcgcaagcatttgtgcgtaataaatagacttatcaactgctgttgtaatacttgttatcggcacaattgctaaattacgatctaccacgtccacattaagaacatcaatgtcagaacgtaattgttctgcgatatctcgataatgtttgttaattttcaagaagaaaatcaccacgaacggcaagaaaataagtatcggccatacttggctaaatttagttatgagtaaaatcataaaaacaataaatgtcacgataccacctagtaagttcacagacaacttacttaaccaattcttaggacgttcatgaatccatttaataaccataccgaattgtgctagtgtaaatggaataaatacaccaacagcatacaatggaattaaatcttcagtcataccatcaaatacaataattaaaataatggctaatacacctaaaataataattgagttagagtagcctaagcgatcacctctaacagtaaacattctaggcatatatttatctttagacattgaagccgctaacatcggaaaagctgtaaatccagtgttggctgctaataccaaaatcatcacggtcgttgcctgtacaaaatagaaggcagcattatcaccaaatatttgcatagctaattgtgataaaactgtcgtttccgtttgtggcataattccataaacatatgctaaaccaacgataccaactaataaaaacgctaaaattgaacccatagcaattaacgtttttacagcattattagcacttggttctctaaaattggttaccgcatttgaaatagcttcaacacctgttaatgatgaagcccctgatgaaaaagcttttaatagcaagaataatgttactccaggaaccgcagttcctactgatgcatgcatatgtggttgaatatctcctgtcgccacacggaaagtacctataaatattaatatcactaaccctataatgaaaagatatactggataggataatacggtggcagattcagttaaaccacgtaaatttaatattaaaataaaaagtacaagtaaacatgcaatcagtactttatgcccatataaacttgggaatgcagcaacaaatgcatcagcaccagatgatatactaacagcgacagtcagtatgtaatcgactaataatgagcctcctgcaagcaatccccatttttctcctaaattggtcttggacaccatatacgcgccgccacctttaggatatgcataaataatttgcctataagacataattaaagcagctaataagatcagaacagcacctgcaatcggtaaagtataccaagttgcaactgcacccactactgataatgtaatcagtatttgttcgggaccgtaagccactgaagataatgcatccgacgaaagaatcgctaaccctttaaacttcgatatcttttcgtcttttagttctctgttttttttaggttgccctataataagtcttttaaattgattgaacataatctcctattcctttttatagtttttgatggatatcactatacgcctatctttccaaaaagtatagagagttaattaatattttttatgtaattatacacctattaacatataaggtgtcaaaaataatggtaaatatacctctttaattaatttattcaatagaactggtataataaaataaatctcattaggcacttaagtaaatttaacatataaaaaggaacgtttatgactactaaaaaactgtattttctatccatttctattatcattttagtcgccatttcaattgctatatatataacattaaatagcaatacgaagacacggttaaccaatgattcgcaacaacaaatagataaaattatcgagcatgatttacaaaagggacacattcctggagcatcaattttaatagtaaaaaatggcaaagtttttttaaataaaggttatggttatcaagatgttgataaaaaagtcaaagcttctcccacaacaaagtatgaaattgcttctaatactaaagctttcacaggtcttgcaattttaaaattagctcaagaaggtcgattaaacttaaatgatgacgtatccaaacatgtgcctcattttaaaatgaactataatggtcaaaatgaaactattacgattaagcaacttttggctcaaacaagtggtatacctagtgatattacaagcgaagacgccgtaacaaataaaaataatcgtttaaatgatgtaacccgtgcaattatgggtgatgaattacatcataagcccggagaagaatttgaatactcaaatatgaactatgatttattaggtttaattatccaaaacgttacgaagcaatcctatacaaaatatattacaaattcatggctcaagcctttgcatatgacacatacatcattcaaacaaaccaataacaaatcaaaacatgatgctattggctacgaattacaaggttcgacacctgtcgtctctaaacctgaatttaacctttgggatacaccatcagcatatatgatgacatcaactgaagatttggaacattggataaaattccaacttaatccacctgataaatacaaatcattagttcaacaatcacataaaaatttatcatcaacaattggtgaacctaatgccaatgcatatgcttcgggctggtttaccaataatgatgaacatttagtgtttcattcaggaacgctcgataacttttcatcatttattttactaaatccaaaacaaaattatggaattgttgtgcttgcaaatctaaattcggaatatgtacccaaattagttgagcatcttaatacacaaattgtaaatcacaagcgatattcgacggttgcgtctatactcaatcaatataaagaccaatttaatattgttaccgttttgatgacaacacttattttattagcatttatattctcagcttatcgtgcttggcaaatgcgccatggtcaaattcttttgcgtagatcaaaacggattgctgtattgagttggctaactttatgtttatgtatcgctatagcgctcatattatatgcattaccatatctcattctcggtagcaataattggtcttttgtactgacttggctaccaatagaaattaaattagcactaatcacaacattaattgcattattcagtacattaattgtaattctgttattccttcatacaaagataacgaagacataataaaaaagacttgttcgagccgtgcgtttgataatatatcatccacgattcgaccaagtctttattctttgtatattaaacggataaattattatttaattggattcatgccgtctttccaagttttataaatcagagtaccaccttgcgctttaaacttctcattgcttacgccacgttcaaatggttgtgcaggttgaatatcaatatttggttcaacaccaagttgttctttataccattctgcaaattcagaacctttaacaggtgcatcatctgctacattatagataccattttcaaaatgaatagcttgaatagatgtttcaactgcatcatcaagatgcacaaatgatgttacgccatctgaaagtgtcacttgaccatccataaattgattataaatcatgccatcttttccgtaccaagtacctgggccatataaccaaccaaaacgtaaaacaacgtattcatccatacgagccgtttcttcttctagaccaaccacaccatcaaccgttacttttctatcaccagttgagttaaaatcaagtgaagtttcctcatttgctaatccttcgccaggttcatacataaaggcaatactttgggcaattactttcttaacgtcatgctttttcgccgcatcaattaagtttttagaaccttcaatacgtactttcgtatttgctgccatatcaacattttttaaatccgtaatttggttgataatgatttctggtttaaaatctgctaacgcttgatcaatagtatcagcttttaatatatcaccaatatatgcttttacattaatagcagctagcttttgttgaccattctcagatgtagtaaaaccagcaacctcatgcccctcttcttttagtctttgaactaatttaatgccaataaggcccgttgcaccagttacaaaaattttactcattataaacaccttttctctatttgtctttttaatataattacttgcttgatgagtttacaaaattcacgtgagacttccaaatgatttgcctcaaaatttttcaaagtgtcgtcgtaaaaactgtctagtaaatactaatagtatgtcgtagacctatgacaaatctgaattatgacgaagatcaatcaagaaaaacagcaccaagatcatttcaatttgaaagtaccttactgctgttctttatttattacatttcaatcttaataatgaccgtaatatcacgtgattgtcatttccttgtaatcatacctaaaacaccaattaatcctgtgcgtgtcgctgactttctttagtatgaattaaatcagtaataaagcgattgactggcgcttcaatatgacgttgtttacccaatgttgcaactgcgccattaatataatcaatttcagtttttctattattaacaattaaatcttgatacatggatggataatgcgcaccaactttttcatttaaatcaactaaatattcaaatacttcatcaacatttaaatgaacattatcaatcgtcgctacatgcactatttcttgcgttaatttataaatcaaacacttcgcataactactttcattcagtgatgccatattacactccaacactgtgcttaatgcatttgccgtaccattaacacaaatctttttccaaatcgattggtataaatctttactaatgacaccattcaattccgcttcgttaagtaaatcagcaacttttataacattttctttaccttcatccactagttcacctatttcaactggtccactaccaagtaaatgactgtgtccagggctttcaagacctgccgtccaagtcgtaacacctctgacaatttgtgattgagcaacatactgcgcaatgacttcttcatgcttcagaccattcatcgtacatacgacgatcgtttcattatcaatatgtggcttcatatcttccatcacttcttttaattgcatagactttggaaatagaaagacaacatcgtaaatgctttcgtcccgttgatcattaaaatgatacatcggaatgtttaactcgaatgcctctccattaatcgttatatttaatccatgttgcttaaccgcttcaacatgagatgtatatccgtcaataagtgtgacatcatatcctgcttgaaatagtttggcaccaaagccactacctaatgcacccgatccagcaattgcaattttcatcctataaacccctcttcatcgttgttgttcattttaaaaatactactttcgcatattagcgtcaatttgaaaatcattcgcttaatatgcacacagcttttatcgtctataaaagaacacacctaacattaaacgtcaatacgtaacattaagtgtgtatgataaacttactttcacaaaatttcctttaaaatccctacataataacttgctttcatttcggttttacaaattcgtttgatttttaggaactaatagtaaaatgactaaaaatgcaacaattgctagcaaggcattaaacatcatacctgtgaaaccacctaagttcaaatttaaattagctgctaacacagtataaactgtaccagatactgctactccaaatgcatttcctaatgatgacgccattttatatacgcctgaagcaacacccgacttatcatctggcgcactagcaactgctgtatcagttgatggtgtagcatataatcctaaaccagtaccaaacaataaatatccaactatactagatatgatataccacacttctggtaaaaatgttaacgacaataagattaacccaatcactgtaaagccacttcctagtaatagtgggcgcttcggaccatgttgagataaaatcttttcacctacacgaatcattgacaacactgctattaaatacgttaatgaaatataacccgtttgcgaagaattaaatcctaattgttgttgataatacgtgttaataacgataagtgcaccacctgctacaccatttaataagaagtttgaaatagttgcaccactgtatcctctatttttaaaaattgaaaaatcaacaagtggatgctttattttattttcgtaatatacaaaaccaactaatgaacagataaacacaacaattaaacctagaattaacggtgaaactaaaccaaaatgagacgtctgtgtgatgattacatttaaacttaacatcgtcactactaaaatgactaaaccaataacgtcaaactttttagcttctgctttcatacctttgattggttctgctttagtctcaggtgcatgtttgattaagtacattgctaataatgttaatagaattgaaacaacaaatattgaacgccaacctatatatgtagccattaagccaccaaacaacgtacaaataccactaccaccccaagaaccaatagaccaatagcttaaggcacgttgtcttcttgtaccaatataatattcgttaataatagcaagtgtggatggcataatacatgctgcagacaaaccttgaattattctacctataattaaaaatgctggcaaaggtgtaatgatgatgagtaatgaacctacaacatttaatatcaatcctacataagtaattttgacgcgaccaaatttatcagcaacatcaccagcacctacgataaacaaaccagcaaataaggcagataagctaacagcgatatttatcgttccaacgtcactactatatgttgattgtaatgggacaacaagattaacaagtgactgcgcgaatagccaaaaggtaataacccctaaaacgatacccaaaagcaatcggttgtcacctctaaattgttttgatgtgtccatgaattagataagcctcctatgtttaagaaaaacaaatttttaatatgatatattaagaaacaatatcataaatttgcagaaaattataaataaaacatctcattttttagcatttttacaataattaacgctttttatccaaaaactttcatgataataattgctattttagtgtaaacgcatacaaacacaacctataaaaaggctactcaaagattatttgagctccttgagtagcctcattttttataaatcatgaaacgaaatcgctaaattataaacatcttctactattacatattaatactttgcggccgatgattagattgatttttacgatgtcgtgttgttgggtctaatcgtttttctaaaaatcttaatagtacatcaatgacgattgcaatgatagcaatcggaatcgcacctgctaaaataaacgttgtgccatccgtcgcatttgtaccacgaatcacaatgtcaccaagcgtaggtgctcctataaatgatccaacggcaacaacacctatcgcaacaaccaaggcaatacgaatgccaccgataataaccgaaacagataacggtaattcaatcattcgtagcacttgattgcgtgtcattcccatacctttgccagcatccttaatattcgcatcaacactagctataccagtataagtgttttttataattggaagtaacgcatataaaaacactgttaaaactactgtttctgaacctaagcccatgactaacattaaaatagctaacattgcaatgactggaactgtttgaattatatttgcaattgtaattacaaatccagaaagttttgtgtatcttgcaagcaagattcccaatggaataccaattaaagctgcaaacagcacaccatagacagacattaataagtgtttgaaaaataaatcccatagataaccaaagttcgtaacataataattgaataattgctgtaataaattaccttccattacttatgaccacctttctgtttatcaaaatagtggtgttttttcaaaaattcttctgcgacgacagcaggttctttacctttaccatccgcttcataattcaagcgttgcatctctgaagtcgaaatctttcctgtcaacttattaatcgtcgttttaagttctgggtgttgccgtaataattcatttgttgcaacagcactcgcagcataaggcgggaaaaattgtttatcatctttaagtactttcaaatcatacgcggcaattcgaccatctgtagaataacctaatgcaacgtctaacttctctgtgtttaatgcgtcgtagactagacctatttgcattggtctcactgtaccaaagtcaaaaccatactcttttttaaatccttcatagccatcgcctttacgattcatccatgaactatccatacctaaacgtaaatctttactatgctttgctaaatctgaaactgtctctaaatgatattttttagcagtttccttcgttaccatgaatgcatacgtattcgcaaaaccatacgaatcaaaaaacgtttgatcaaatttctttttaaatccttgttgtgtggctatcattgctttcttaggatctttaattggtgcttccttcaaagctcccgttaaatctgtgccattatatctaacacctgatatattagcatccccattaattaaggcattatgttgaatcgtacttgaccctaaattatttactaatgttggctttatcttaccatgtgtatcatgctctattaacaaccgtaacatatgtgaaataatttgcgattcgcttgttgataatgctgtaattttgacatcatttttcgtgctcttactacctagtccgggcaaactacatccagataatacggtaagcgataagacaaacacgacaagtatatatttaattttcttcattatcttagcctcctaattatccagatacttttaagcctttgggaactacccatttttcaactaaagctaataaggcatcaacacctaatgctagtgcagtaacgagtaccgttgcagttacaatcatcagtggatcatataaatttaaaccattgaaaatgaaatcacctaatccacccgcacctacataacttgcaagtgtagcccaactaattacatacacagatgacaaacgaatgccaccaatgataagcggcaatgctaacggcaattcaacatccttcatcaattgaaattgtgtcattcccatactttttccagcttctttaatgttgctatcaatattttgaacaccgagtaccgtgttatttaaaataggtaataatacataaataaatagcgctacaattgcaggcgttttaccaacaccaaaaatcggtatcataatagcaagtacagctagtgttggaatagtttgtaagacacctgccacagttaatacaatattggcagttcgctttgtttttgataataaaatgcctataggtactgcaacaatgatggcaagtaataatgccactatagaaatataaaaatgttccagtgttttcgacatcaactgtccaccatgttcatgtaggaactcaatcatgatttatcatctcctatgtcacgtactttgacattagtagtgtgttgctcatgcatttttgaggacacagtgtcttcccccacatgttctgtttgcactgcatcctcactatcgccccaaatcgtgtcatatacaatgtcaacaacattggcacgcgtaatcagtcctactaaacgttgcttatcatctacgacaggtacattcctaacgtttctttttaaaatcgtacgtacagaatcttgtaatttagaatcaatttgaacggtataaatatgttgttgcatggtgtctcgtaaacttttgtgtccacgtataccctgatttatatcttcaatgtctaagaaacctagtaaatggttattactatctactacaaaaatagtatcaacacgcttttgtctcataatatgaacagcatcattaagcgttgcatctgcctgtatcgtgattggtttaatcattacaccttctacagtcttgtcattgggacggtcttgaatcagtctattttgtcctataaaatcacgtacaaaatcatttgcgggatgtcttaaaatattgtctggtgtatcaaattgcaccaccttaccttctgacataatacaaattttgtctgctaatttaatcgcttcatccatatcatgtgttacaaagataaacgtcttgcctaattttcgttgtaacgttttaactaaatcttgtaacgtatctctcgtaataggatccaatgcaccaaaaggttcatccattaaaataatatcttgttcggccgcaagtgctcttacgacaccgatacgttgttgttgcccacctgatagttctgctggataacgctctaaaaatgactccggtaaatccacaagtttaattaattcctttgcacgtttatccttttcttctttagtccatttcaacaatttgggtaccaatacaatattctctttaatcgtcatatgaggcattaacccaatttgttgaataacataaccaatatttctacgtaattcgacaggattcatactccgaacatctttaccatcaatttcaatttgtccttctgtcgcttcaatcatacggtttatcattcttaaagcagttgttttaccacttccactggttccaataaatgcgataaattccccagattgaatatctaaagagatgtcatctactgcctttttattaccagaataaattttcgttaaatgcttaatacttaacataatcatttctccttcctcataaaaaatatgacgaatgatacgcataaaataaaaagaccattatcgcaattgttaaacaaatagagtcataagttaaacaagtacacatcatggtcttgattatgtagaattttatatttttcatctgtaatgtgaatacttaacagtaaacggcgctatgtatgttgaatttctaccgattactttgtttgcacattcgtatattcgacatttaaaactaacatactctatatgatgttattaaacattattattttatctttggcaactaaatagataactcatattttttaaaagcgaatttattatcgctcaattggttgttttatagcaaaaaagtgtcgaaaatgtgaaatattattacaaaagtcgaatttttgtaataatgcacacgcatccattgttacagacggacaaccgcccatccgccactcacaaagtcatccttatattttaatatcttcatcattcattgtagacacccttgccttttgctaacattttctactcccaagcctgtaacggaattccaacgtcaaagtgttgcccatgacagacacacctaaaaaaacaaccaacagcatgagccattggttgtttcgtgtcatcttgtatgttgttgtataaccggtatgctttactcattaattacttatcatgcatccctttaccttctagtatttggttaatatacttttcaacacgcttttgtcttgtttcactgcgtttagcttgtccaatatgatatatatattgatgttgtctgcctggcgttaatttataaaatgaagactctaactgtggcatttcttcgaacttagcttctaactctttaggaataacatattcctctgttttcttcatttcaacttttttaccagctttttcagctttaattgcttcggctagataatatttaatttcttcggtacgtgcttgaatctctgttaaattttcaaatcgtaactgacgagctgcttgcaccttttcagtctgttgaatgagtgtatgatatttatcctccaaaatggcacctttatgaaataatagtgcaacataatttttgaagccatggataagtactacatttttattattcaacgtgtaacaaggatgcatccatttatacgcttcctctaattctgtttcattaaagattaacgctctcaaatatttatattcttcttgccattgactctctttatttaaaaatgcttcaacttgttcatttgattgtttctcactcatagtcatcacttccattttgtttttcaatacacattgtattatatatcctaattttataaaaaactaattttacaaatgcttttgcgttcttacaaaaaatgcatttgactattattataataagcgtataattgtcgcatattattttttgtatttttggcaataacgaaggagtatttatgaataaagacaagcaattgcacaacgacaaaatcaatctatcccaattagtcttattagggttaggctctttaataggatctggttggctatttggtgcgtgggaagcatcatcaatagctggaccagtagcaatcatatcatgggttcttggattcctagtcattggaaccattgcctataactacattgaaatcggcacaatgtttcctcaatcaggtggcatgagtaactatgcccagtatacacatggctcattattaggctttattgctgcttgggcgaattgggtgtctttggtgacaataatacctatcgaagctgtgtcagctgttcaatatatgagttcttggccgtggcattgggcgaaaccaatgagatatttaatggaaaatggctctattagcacatacggattgctagctgtatatctcatcattgttattttttcattattaaactattggtccgtaaaacttttaacatcatttacgagtttaatttctgtatttaaattaggcgtacccatgttaaccatcatcatgttgatgttatcaggattcgacacttcaaattacggccattcggcaagcacatttatgccttacggaagtgcaccgatttttgctgcaacaacagcatcagggattattttttcattcaattcattccagacaattattaatatgggttcagaaattaaaaatcctgaaaaaaatatcgcaagaggcatcgctatttcactgtcaatcagtgcagtgttgtacatcattttacaaagtacgtttatcacttctatgcctcaatcaatgttacaacatagtggatggaatggcatcaacttcaattcaccatttgcagatttagctatcttattaggaattaattggctcgcaattttactatatattgaagcttttgtatcaccattcggtactggcgtgtcatttgtcgccgttacaggtcgagttttacgagcaatggagaaaaatggacatatccctaaatttcttgggaagatgaatgaaaaatatcatatcccacgtgtagcaatcatctttaatgccatcattagtatgattatggttacattatttagagattggggtacgctagcagcagttatttctactgcaactttagtagcctatttaactggcccaacgacagtgattgcattaagaaaaatgggaccaacaatgactcgtccatttagagcaaaaattttaaaagtaatggcaccattatcatttgtattagcttcattagctatatattgggcaatgtggccaacaacggctgaagttattttaatcattatacttggattaccaatctacttcttctatgaataccgtatgaattggcgtaatacaaagaaacaaattggtggtagcttatggattattgtatatttaatcgtgctatcaatactgtcatttataggaagcaaagaatttaaaggcttaaatatgattcactatccatttgactttatcgttattattgttgtggcgcttatattctattacatcggtacaacgagttcatttgaaagcgtctatttccgtcgcgcaacacgaatcaatacaaagatgcgcgagtcactaaataatgaatcaaagtcatctcattaaatattttaaaatgcaatgccatatatgatttcaacacacacacattaaccaaccattgatttcaacatcttggttggttttttattttgaaaatcggttataaataactaacataacaatgtggcgagagtgatattgtaatgaaatgtcactgtagaagaacatcatataatgctgaaaatggtttgagttaaaacagatatcaagctagtctgattcagtcacaaaattgtcttgttatacttgtcacctatcatctatagaccgtggtatgattaaattggggatgataaaggaggttaataaatatgaagattaatactacaggtggtcaaattcatggtattacacaagatggtttagatatcttcttaggcattccttatgcagaaccaccagttcatgataatcgctttaaacattctacgttaaaaacacaatggtcagagccaattgatgcaactgaaatacaacccatcccaccgcaaccagacaacaaattagaagattttttctcctcacaatctacaacttttactgaacatgaagactgtttatatctaaatatttggaaacaacataatgatcagacgaagaaacctgtcatcatttatttttatggtggtagttttgaaaatggtcatggtacagccgaactctatcaaccggcacatttagtacaaaataacgacattatcgttattacatgcaattatcgtttaggcgcattaggatatttagactggtcatattttaataaagattttcattccaataatggactttcagatcaaatcaatgtcataaaatgggtgcatcaatttattgaatcctttggtggcgacgctaataacattactttaatgggtcagtctgcaggcagtatgagcattttgactttacttaaaatacctgacattgagccatacttccataaagtcgttctactaagtggcgcactacgattagacacccttaagagtgcacgcaataaagcacaatatttccaaaaaatgatgcgcgattatttagatacagatgatgttacatcattatcgacagatgatattcttatgctgatggcgaagctaaaacaatctcgaggaccttctaaagggcttgatttaatatatgcgcctattaaaacagattatatacaaaatgattatccaacaacgaaaccaatttttgcatgttatacaaaagatgaaggcgatatttatattactagtgaacagaaaaaattatcgccgcaacgctttatcgacattatggaattaaatgatattcctttaaaatacgaagatgttcagactgcgaagcaacaatctttagcgattacacattgttatttcaaacagccgatgaagcaatttttacaacatcttaatatacaagattcaaacgcacaactatggcttgctgaatttgcatggcatgatacttctagcgcacactatcgcagtgcttaccatattctagatatggtattttggttcggaaacttacaaatattagcagcacatcaatatccaacaactgctcaccttaaatttttaagtcgacaaatgcaaaatgatttagctaattttgctaaaagcggtaaaatgccttggccgatgtatcataatgaacgtcgctattatcgcacatatcaataacgttatcgcatctaaaaaagcacacctgaatttgatagcaggcgtgcttttcatatgagaattatgatgatttaaatgttttagcataatgattatttttcaatgtgaaaacaacgattaatcctaatgcgccaatgatggcactcgtatatgtgatagcttgaacagaaacatgtgtcatgaccaagcctccaataatgccgccaacaccaataccagcgtttaaactagacatgttccaactcattacttggcttgtgtcgccttcaacatgttgaatcacaccgctttgcactgctggattagtactccattgcatgatattccaaataaatagtcctgctaacaatagacctgaaccaggtaagattaaattcataagtaacatcataacgataaaaatagaaacagaaatcattaaccaacgcttacttgtaattttatcggagaatataccacccaatgatgttccaataacgccagcgattccatttactagaagtgctaatgaaacgaatgacatatcatgaccattagataaaataagtggatttataaagacgaatgtcactgagtttgcaatcaatactaaaaacgtaataattaaatattttgctacttcagcaggtcttaatattttcgaagtaacatgattttcatgagatggtgcctcatgattcacagggcctcgttgtatttcctgatccttcggtaaatagatcatcatcaagaagccaacaataatactcacaataattaagaatagaaatgtatagcgccaacctactaaatcgccgataaccgttccaattggtacaccaaaaacattggccccactaaaccctgtatagacaagtccaatcattttgccacgatttttaggtgctgataacatcgctgtaatagctaatacttttacgataattagtgctgctgctgcagatgagataattctaccaactactaatattgaaaaatttggcgctacagcaataatgccattaccaatgataaatataagtaatgtccataataatacaggccttgatgaaaaacggttcgttaatttaaccagaataggtccacatatcgcaaatgttaaagcgtacattgtcactaattgaccaacgacagcttctgatacatgtaagtcctgactcatcaagttcataattcctgcaaccatcatttcaaccattcctacgataaaaatacttaaaatgaatgtaaatagtcgcatgattgacattttaaaactcctttcaaacaaaatttccgatattcatttcccttagaataacgatttattaaaaaatgtgtgcaacacaattttatatataaccgttctattatataatattttgctttaattttctgtgcttaaatggaaaattattgaaattgtttttcagtatttgaaaaattaacacaagtatgtcatttaataattatgtataattacttcagtttcaacaatgtcttcaaaaaagcacgcacgctttatatgtcagaacagataactgactacaaagtatgcgtgcctttatgaatattttcgctgtgttaatgaatagcgatactatatgtgcgcgtcacttcatttccaattaaaactaatgcctaaatctgatgcagtaaaatctatcatgattcactcttaacatccgtatttcgtgctactaattgatgtcttgcattgaaaaattgaccatagcttaaatatgtcgcaatcaaagcagacataatggtcgcagttgtatgaataaacacgactaacaattgaaatttaatcgcttgtaaaggtggtacgccaccaataattaagcctgtcatcataccaggaatcgacacaagcccatatgttttaaccgaatcaattgttggcactatagctaaacgaatactttcacgtattgcacctttagaagccaatttaggtgtagctgcaagtgataatttagattcaatattagtaccatcttgtacgaatgcacgatctaaattctggtaagctaaattaattgcaatcaagccattatttgcaagcatgccgccgataggtataacttcattggctgtaaaatgaattgcccctgtagctacagtacctgcaagtggtaatgctgttccaatgaagatagctagaaatgatatccaaaacacatgatgcatcactggtgatgctcgactaattgtattccatgatgcattaataataatgaccaatacacataaaataagcagccatttatcgtttattttaaaaatataatgcagcaaaaatcccaaaatgattaattgcaccactgcgcgtagtgtcgcaacaattaaatctttaataatatgtaaaccttctttatatgaaatgataatcggaatgactaaaagcaatgccgtcaatccaagtgccgtattactcatgttgattcaactcctcaaccttagaaattttgccatcaacaatcgttatgcgcttttgaaaatgtctcatactttgatcatcactatgggtaatccacatgatagcaacatcctgttccactaacttaaaaatgatattttctatcttttctttattattaacgtctaatgcactggtcgattcatctaataaaagaatatccggtgtatacatcagttggcgcgctatagcaattctttgccgctcaccacccgacatattttccacttccgaacttaattgataatgtcccaaaccgacatctttaattaattgctttgcacgttttctatcaaatttatcattacgtgcaagtgatgggaatatcatgttatcttcaatcgtttcaccaaacaagtcactttgctgcatcaaataactgattcgttgacgcaattcttccgggtcataatcattatagggtttacctttaaaataaagttctccactagttggactaatcaaattacatatttgcttttgaaatgtacttttaccactacctgatggacctataatggcaatactctcgcctttatctacttttagactgatatgatctagtatgattctatcgctcgctttatacactaaatctttaatttctaacaacatttgcaccgctcctcatgtaatatatcaggtatattattcccgtttttttggtttttagtgcaattacatttaagaaaaaatcattttcttgtaatatcaaaatttaggcataattgattttcagcatttaaattaaaaacaaaaaatcctattaacatggatactgtctaatgactaagaattaaagttagacaattgtttaacaacctaccatattaaaaggattctttattatttatggatttgattaccacatgatatttttataactttcatcattcaatgaacggacaatttcagtaacaagacggatagaattttcataatcatctacattgagcactgaaacattagaatgcatgtatcgcagcgtaacaccgattgtcatcgttggaataccttcatttgcgacatgaatacttcccgcatctgtacctccacctggtgtcgtatcccattgtacttcgatgttatgttccttagctacatctttaatatgcttacgcaaaccttggtgagcaatacttgtagcatccatcataatgacaactggaccaccgcctagtttactatcgctcgtttgacctgacatacctggggtatcataagcaatacctacatcgacagctatcgccaaatctggtttaattgtattcgctgccactttcgcaccacgcaaaccaacttcttcttgcactgtggcaccactgtataagttaattccaatattttcatcttttaaacgttttaatacctcaacagctaatgcacagccatagcgattatcaaatgctttcgcagttaaatatttatcatttgcaagcacttcaaattcactatatggcgttaccatattgcctacttcaacgccagcttcttcagcttcttccttgctactaacaccaatatctataaacatatttttgatttccattggctttttacgttcttcaggcgttaagacatgtggcggtttagaaccgatgatacctctaatttctttgcccgaatctgttgtaatcgttactttttgagatagcatgacttgattccaccatccaccaactggcgtaaatgaaataaaaccatgtttatcaatctttgttaccataaaaccaacttcatccatatgaccagaaatcataattgagtattgaccattctcagcatttttctttccaaaaatgccacccaagttatcttcaataatttgatcactgacaggctctatatagttacgcattgcttctttaacttgcatttcataaccagcaatgccgtttacatctgttaaatgtttaagtaatttgactgactgattcatgttattcatcctcctgtatttcaacttaaaactattgtatcactaactttcagaaaaacgttccctaccgctttatcattttcaggcttaaattttttaaaattttgtgagaaatccgcttcaaaaacctcatatttttaaaatttaatattccgaaaaagtcacaatttaaaattccttattataatatgttattcttttattgttactaatttcaatttgtttagtcttgcgctattataaaattaaaaagtgtagagataacaacgcattaacgtcgctattttccctacacttaaatactagtttctttaattaacttaccattaaagttattcagatattgaatattcattaatcataatgtgaccatgccgatagtattaatacttctttatttcgatcatctacggtatagacgaccctgtgctgatggttaattcttcttgaatatcgctctaaatatttaggctctaatttttcaaaagattgtgttattttatacggatcattttttaaagtctcaacaatttctaaaaatgacttctttaaataagaatgttttattttccttaaatctgatttcgctgaatttttaatcttaaccgtgtaattgctcattaaagattatcccaatcaatatcatctatatttgttgtaccactattatctttttctctttctcttactttgtccattgtaccagtagattcaagatatattgtctcttgtatacttttccaatcttctaaacctataatcacagcattattttcggcattattgccactaatataaattggttcgtgattattattaacattttttagtaattgataaaaatcttttctcgcttctgtagggctagtgataatcatataaaccctcctttgttttctgttacgctaattatagcgtacgcacttgagtacgtcaatattgccaacgagttcatcgtattcttaatacctatatgctatcgtacacaagcttttgttcttttcttccaacataccgtctataatgctcaaaaagaaatcagcagtggaacacactacgttccctaccgctttatcatttttcaggcttaaatatttttaaaattttgtgaggaatccgcttaaaaaactcatatcttcaaaaaaaatgacaaaatttaaatttttgaataacatcattttttagtaaatgttataatttctttataatacaaatatcgaaagaaggcgactgactttgaaaaaattatgttcattaattgtagtagcattaatttgtatcattgcattatcagcttgtggtaaagaacaaaccaaaacatatgaaggtgatgttagtggtaaacatgtactaacttctatcacatataaagatgataaggttttaaaacagtctacaatcaacacaattaaatatgacgatctaggtatggataaagacgaagccaaaaagttattcgccaaatctgaaagtattttcaaagaccttaaaggcgtaaaatacaaagtagactataaagataaaaaagcaattgaacacttagacatagattacacagaagttgacatgaaaaaattaaataaacgtcttggtgtttcaactaaagaaaataaagatattagttttgaaaaacttgaaaagcaattaaagcacagaggtttaaaagaaaaagataaaatggacgacaaatagtttataacataaaaatgccctcagataagactaaggatacaaaccttaattcatattctgagggctttaatatttgaaattcttgtgtgaccagcatccactactaatataaaattatttgcagtaacactaaaatccgctgctttcattttctcgaaatagataaatcaactaatcaatttcaatttataatcatgtatcgtttgtaactcaccatcgacttttcgatatacaatatgatcagcagtaatttctgtaggactggatacgccaacagctgctgcaatattgaataagccttcatgcaaacttgttacatagtttgtgacacgatattgcttttctccaacaatcaatgctttttcttttttcgcatctgtcgttgcaacacctacaggacatgtattcatatggcattgttgactcataatacaaccgacactaatcatcatgccacgtgcgatatttacaaaatctgcacctaaacctagtgcaatcgcaattttatctggtgtcactaacttaccagatgccgccaatttcactttatctcgaataccatatttttctaacatgccagacacaataggtagagctgtaaatagcggtaagccaacaccatcttgtaattcttggaatgttgcaccagtaccaccttcaccaccatcaatcgtaataaagcttggatacttatctagttccaccatcgtacgtacaagtgtttcaatttctgaaactttgcttactacaattttgaatcctactggtttttgacctaattgctgcaactgatcgacgaaacgaatcaaatcttcagcattatgaataaattcgtaacggttaggtgaattgattgttttataaggttcaacatttcggattttagcaatttcttcgtttaccttttcagcttccatatgaccaccacgagtcttagcaccttgtgccaacttcagctcaaatgcgcgtacgttagataactgtgcgacctctttaaataaaccttcactaaaattaccttctttatcacgaacaccaaataaaccgggaccaatttggaaaatgatatccccattaccttttaaatgatattctgataagccaccttcacctgtattcatccaagtgcccgctttagctagacctttagataaagctgtaatggcattttttcctaaagcgccataactcataccagattgtcctacgatacgttttaaaataaatggatgttttaaatgttcacctaattttattgcatggtcatcacttaagtaatacggatcaatctttgtcggtacacgatattcttcacgactaaataaacgctcattcgcgattttataaatgaatgttgataacaatgttgtattatctactgaaatctcattacgttgcatcggaaacattgtgttctgtatgtaaaagccgtcttgataatctttagtagtaccgaagctggtcatacgagagttatattttccagccaaaacgatatttttataatcattacgtgaaaaaggtttcccttcattatccccagaaaataaatactgacgtaattccggtcccattttttctgaaatatatctaatacgtgctagtaaaggataattccttaatacactatgttgtgattgtcttttatctttaattaaccaaataagcccgataacaataaccgtaagcaggaagcctacaacgataatgttaactataaattgcatgactgtaagaaacgtcattacaatacctccccccaaaatttcaattcaatatttatgatacaccttacaaaacaaaacacaatggaagcgcttcattttataaaacaattttatgatatgtttttcattttaaattttaatgtataaaacatacaatacaaagtaatatgtgctaaagtatctatataatacaactatttaagaggtatactatgtcaaatacaaataaacattacatagaagaagaatacgctactgaacaatcgcgttttttcaaacgtgatattggatttattttcctttatatatttttggttaacatcttgccaatcattatcgtctttttaacttttgggttagtagctgtattcactcaacaagccccatggggtttctcttttcctatttcaatgaacattagctatttactcgcagttattatttcactagctatttttcgtcggatgcatgaagatgcatttgttccgatgatacgtacgcaaatcattgccagcaccaaatataaatggcatattcttatatcatttacactaagtgtcgtactctttttacttttaaattatttcgatattttcgcactaaatgtagatgcctttactgtctttgacatttacccgctcattagagattatgattccatcagtttaatagtaatgttgtggttaaccattatattaaatactttgatttgccaacttattttccgtcatattttaattcaagaattaagcagattaatacctttaaagattacaatagtattatccgttatccttgaaacactgtactattatccatacattaatacatggtgggaattcattccagcattgatactagctagtagtgcgacttacttatatttaaagtcaaaccgtaattttatggtgagctatttctatcaattagcagttatactcgttttgcatattttcatgtaaaatttttcagagtattatccattatccatacacatcaaaaagcacacttaaaagtcagtatcacaactcacttttaagcgtgctttatttagatatactgtcgttctaaaaacgagccatatagagagcctgagacataaatcaatgttcaatgctctacaaagttatattggcagtagttgactgaacgaaaatgcgcttgtaacaagcttttttcaattctagtcaaccttgccggggtgggacgacgaaataaatttttcgaaaatatcatttctgtcccactcccatgaatcgccatgctcaatataccttttaaaatttaaatattcattaacttaatatgctttaattcacttcattaaagactactcgctggacgtggtgttggctttttcaagaaactcataatcattattacaatgactaacataccacaaattagatacatccatttaaatcctactaaatcggaaataggtcccatcaatgcgccacctaacgatatacctaagtctgcacaggcaataaataaacctaacaacatattacgacctacttttggtaagacgaagcttaagtatgatgttaatgttgggtacaccattgcttgcgtcattcctattaatatcgcactaccatagaaaataattgcacctacttgcggaccaaatgccactacaaatgacgcgattactaataatgatagtacagataccatatatttaggatgccacataccatctgacggaatgtatttccttaagtaaaatcttgccgcaacaactgcgatggcctgtattgtcaaaaagattcccgcattcgcgaatcctaaactcactgtgtataacggtacaaatgtactaactgcaccaaatacaatcgatgcaacaatcatgataataccactgttcaacaactctttatttttgaaaaattgcgcaaaaacagttacagcgttaaacggcattttttcaatcttatctgacgtatcgggttcctgttcagcaaaggtcacgcgatagccaaagaatgttgttgttaatgcgataaagataatgacaattgcaaatagtgaaatattatttgcattccaaatacctacggcaactaatggtccaattaagtttggaatcgttgaaaatagcgagtacaatgatacaccttcagaacgatgttcctctggtaatgcatcaataatacctaactgtaaagacatagaaaagaatgccgtacacacaccttgcataacacgtgctacgaaataaccttctaatccagtaaaaccataaataattaaagctatggcattgatgatcaaaataattcttaaaactttaatgggaccgacacgagcaataatttgtcctgcccatggtcgaaacaccattgctgttaacatgtatgcccccataacgataccgataaccgtattcgttgcgcctaaatcatgccctcgtaacggtataaatacgtttaagattgcattggcactaaagaacatcaatgttaatatatataatctcaaaaagggccaagccattgcacctttcattatctcactccttagaatgatagttgtttttctattaattctcttgtataagcattgtcacttttatgcaatgcgcttgtcggaatttgttcttctatttttccgtttttaaaaataattaattgatcacataaatacgtggcagcttgaatatcatgtgtgataaaaatataactcaactgacgcgtttcacgtaaatgaatcaataaatctaatatttgtgtttgaattgacatgtcgagtgaactaatggcttcatcaaacaaaatatatttagggttaatacatattgcacgcgcaatcgcaacacgctgcgcttctccacctgataacatattaggatatttatccatgtatgccttagatagaccgacttcttccaacaatgtaattgcttggacttccataacttctttaggttgtccatcacattgacacatcacttcaaataagatttctctaacagtctgaaatgggtgtaatgatgacgtataatcttgaaatacagcaccaatttgatgacgtctgactttcttcttatgcatcggtagatcatttaaggttacacagcctttatccggtttctcaatacctaatatcatacgactcaacgtcgatttaccgctaccactttctccgataatcgcaatcgtcgcaccgattggacactcaaatgacacacctttcacgataggtgttcgacgacgcttaaaaacatgtgcgctttgatatgatttttcaacatctgtaactttaatcatgtacatcacccctcatcacatgtttaaaatgatcattaatcttcttcttcgttgataataaatacttcgtataaacatgttctggatgatgcaagactgattcacgtgtaccatgctctatcagttgaccatttttcatcacaacaacacggtctgcaatcttgttaataaccgttaaatcatgtgaaatgaaaatcatcgcacagtcaaagtgttttttaatatctataaatgcttccagtacatcatattgtgtaattgtatctaaagccgttgtcggctcatcagcaatgattaactttggtttcaaagctaacgctaaagcaatcatcaatcgctgtaacattcctcctgataacatgtaagggtatgattttaatatacgtttaggatctttcaaacttaaataatccatatattcaatcaatgtcttttcaatttcttgtgtagacattgacgtatgtactttcatagtctcaaacatttgtttaccgacagtagttgatgggtcaaaggcacgactaccttgttgcatgaccatcgcaatatctttaccacggtactttttccgttgcgattcagataatgacaacattgatgtaccatcaaagataatttcacctgtcaccccgagtcgttcgggattcaaaccaataatcgatttgcatgtaattgatttaccgctaccactttctccaataacgcctaaagtttcacccttagttaatgtaaaattcacatcactcacgagtggttgatctgtccaggtatctgtaatcgtcaaatgcttaactgttaacaatgtcatgattgcaccactccttttttcacagaacgaagtttatctttagaagagatgcggggatcaatagcaatttgtaaagcatcggataagaagttaaatgccatcactataatcactatggcaatacctggcgcaaacatcatttcaggatgtgtaaacatcacttttctagcttcgttaagcatcatgccccactctgcagtaggcgctttgacacctaatcctaaaaatgaaaagccagatatttgcaagatcattgaacacatcgaactactagagatgatagcaatatctgctaatgttaacggcataatatgtttgtgaataattttcatatcattcataccgattgttttagcaaatctgacatggtcagaagcagtgtactgcataacacttgtacgtataacacgacagaaccatgcccaacgcgtcaaaataaatgccatgataatattttcggcacccattccaaacaatgcaattaatgctaacgttacaacataacttgggaatgccaacataacatcacacgcacgcatgattaaggcgtcaacaaacccttggaaatatcctgataagaatcctaaaatagatccaataagtacagaaacaaatagcgcaacaaagacatataacaaacttggtctaatcgcataaattaacctagttaaaatatctctacctaaatggtcagtacctagtagatgttgaaaactgatgccagcaaatttgtttgctgtatcgatatggttaggatcataaaatgtcacaagtggtgctgctaatcctaaaaagacatataatacaataatgcctaaagcaattactgcacctttatcttgtaataatcgttttaaaattatcatcgtgcgccctcccttaatcttggatttaatagcgcattaatgatatctgctaatgtattaaatacaataaataataccgctacaattaatacatatgcttgaatgactggaaaatcgtgttcaagtattgcttttaaacttaattgacctagtccaggccatgcaaagatatactcgataacaactagtccacccattatcattggtatagacatacaaaagattgataccgcaacttgtatagcattacgcaacacatgcaacattaatgtgatagatttcacaccgcttgctcttaaataaagtacataatcttcatttaattgttccaccatcgagcgtctaacatttctaaagtaaataccagcataggcaatcgtaataacgatcactggcaatatgtaactttctgggcctgttaatccagaagtcggcaatatgtttaacttcactgaaacgtaaataataagtattgaagctatccaatatgatggtaatgcagttagaaagaaagccactgaacgtatcgcacgatcagtgaactttcctctttttaatgcactaactacacctaaaataattgatgtaatcatcaccataacacttgaaattattgttaatttcaatgtgttcataaatgctgggccaatgcgttcagcaacaggatcccctgtaatgtaacttgtaccaaaattaaattgcatcgcttcaagtaaccagtttttatattgaattaataatggatcattgaaaccgtacttttcattcgtttctgcaatcaactctggtgttacatttggcgttccttgtgcatgtaaaattgtcacagctggattttcatttgtaatatacgtcaatagaaatgtcataaaacttactacaatcactaatggaaacatgagcgcaatacgttttaagataaatttgaacatctaattgctcctttatttatactgcatttcattgaatggtaattcatactgtgattgtgtgaatgatactttttctaaatctttcggcgcaacaactgtcatactaccgtgtgaaatagggataaagataccttcatcatcaatttgtttcaaaatgtttttataagcgtctgaacgctctttaccgttttggattttaaatgcgtcatcaatgctgttgtatattttatctttgttctcaatgcctgatgttgcactttcataaccatttttcgctttaaatgctgcaatagtactttgtggatcgtacaataatccccaagtttggttgaacattaagtcataatcaccagaagtacgacgttcagcaattttatctgatgtttcgccattgatgtttaacttaatacccattttcttaaattctgcttgtaagtattctgcttgttctttttgacttgaagaacctttgtcatagtacattgccatttcaaggtttttaccatctttttgacgaacatcactgtctttacctttcttccaaccagcttcatctaataatgattctgcttttttaaggtcatacttacgtgttggcatatcgaaattaatgtctgttacatttttcgcaaataattgagttgctggtttttcttgaccatctaaaatttctttggcaattttatctctgtttaccatatgaccaatcgcttgtctgactgttttgtcactgacagcgttatcttttttaccagaattgacaactaacattttcgtattcataggttgactacgcttaacttgatagtcacctgtatctttcaattgttttaaagagtctttgtctaagctatccgtacctctatcatctgtgaaggcaaagttcgtttcaccttttttcattgataggaatgctgtttcaccagcaggcattacttttgcttgtactttgttaagtttagacttttcgccccagtattgatcatttttgttaaagtctgcagactcatcttttttgtgttcacctaatttaaatggaccagtaccatcgaactttttaacgccatcttttgttgtaccgtttttaaagtcttttggagacacaaatacatatggacgaggcatcgctaattcagccaatgcaggttgatatgcttctttcaaattcaattcaaccgtgtacttatctttaactttaacattgtcaattaatgttgaaatctttaaccaagaatgcaattttttattttgttgaaccgcatcaatatttttcttaactgcgtcagcatcaaatgttgttccatcatggaatttcacatcatctcttaaatggaatgtataagtcttcccatcttcagacacatcccattttttagctagtaaaggcttaataccatctttcgtgttacgtacaagcggctcgtatatcatactttcagcagacattgatccaccgtaaacatgcggattcatatcaccgatatctttaaccgtcgtatacgttaattgcttgttttcttttttctcctctaaacctttattaccgccacaaccagttaaaattagccctgatgcaagtaacattgcactcattttagttagttttctcatttgcttttcctctttctaaattgataagttgcattacttaatcaaatcgtaatgattatttttctcaattatttgcttatttttatgtaaatgtcaaacataattcaataatttttttctattataaaacttcaaacccttattatgaaagcgttctattgatttccaaaaattttgtgacgagtgccttatctccttcaaatagatttgtattaaattgagaagatagttgttgatcttggtgcatatccttgtacgcctggcaacttgcttcatagcgagttaggaactgatcaatcattggcgttttgatacctaacattttcccaatatgctgaatcatcgccgttctgtaataatcttcacttggcattcttggaatttgaacaacatcctgttcatttttatagacttgcttaaatggtacagctgaaaaatcaaagtaatgtccgttttcgtctggctgtgaaaatggatcaatgaggattgcggtgtatcttacataaagcagatattcttgtaagatatctggcaagatttcgaaatgctcaatatcaccttcatccaaagtttcaggacgtactggataattttccttcaccataaattgaagcaggttgactgacggcactctaaatgcttgtaaaatagccatcatttccttccacattaaacgcatttcacggattaatgtcatcgttatcggtccttcaggaaataacttatacacataaaccggtacatccgttccttcgaaaatggctttcaatgaaaagtcattcataaatagtggcgggtgcacataaagcgaactgttacgtgtttcagcatgcagtggcgattcaacgacttctaattgaatcttcaattgctcagctaaagcagagattcgttgacacattgttgagtttgaatgtgtcgatcccatgtacaatttcttttttacacctgttgtcaacacatgattaggtgcttctttatcaacaatacgtgtatcgccaagataagttgaaaatgaaatcacttcgatatcctgactgaacttagacataaattgttccacaatcatttgcgatccaaatgtcggtgaaattaaaatgacatgtttgacactttgcaaagtttctaacgacaattgctgtagtgtgtcataataagcatctgctgtgcatgccatgacaaccgtttcgtattcacccttaacgtttttaacatctttatacaaacgattaatttcaaacttaccttccagatgttgatgcgcctcgttttgtattttgacttcaaattgtttctcttttttatacgcttgatataagcgttttgatttttctgatgttgaggcacgtccaaccatatcaatctcataatctgattttaaatagcaaatattcgctaattggattgcgaccggaccagtgcctatcattaataatttagacatccgtaatacctacctttatagctgcttttttataaagtgctatatcaaaaatttgctgtggtctcatatgtttattcacacattgccacttatcttccgctgtttcttgtgacggataattaaatattgctttgatgccatcaccaaagcgcattgcaactacgacattttcatttgttaaatcatataattcttctaaaatgctgtactttaaaggaattgtcgagctgaatatgatatgcgtcacatctttgatatctttaagttcagataccttttgatccgtaattgttatatcttcatttggtgctaagacgttaacgattctgcgccctaggtcaacggcttgtggatcaatatcaataccgataactgaagcacctgtttcttttgctacttgaattaacgtcattggatatgcacctgaaccaactaacaataatttgtcattgctagtgatactacattgtccaaactcttcatcaatacaatgttctatattgtcaaagtaacctgtggtagacgcctgtccgtctaatagacgtctagctctaatgacttccacttgtttaacacactgcgctgtaatatattgcagtgattttattaattgtgctttttcttcaacgtcacgccaagcattaaattgttgttcataaataggatttaaaataaattcactatagtcatccatcaatgtttctaatgcttcgatatattgatcgtcttgtaatacacgctcgtaatgcgcttcaaacttttccaaatattgttgtaatatcaatttgatttcattattaaagttattcattgtaggctccttattctatatatgcttttcctgtagctacagttgtaacctgtcctttaattgaagtttgatatcccaattgatgacatcgctttgatgtcactaaaatactgccccctggctgatgtactgtaaaatctttgcatgcgtcattacgttgataattattaaaaaccccaattgatgctgtaccagaaccacagctattttcccaaattaaactttgaatttctggtatatagattaatggctgtaaaaattgacgttgttcatcaaaaagcatcatacctactgttttatatttgtgactccattgttgctcacgcacaaatgcttcaaccaaatgttgaatttcagttgttacttgtttaactggaatcacataatgtacatatgtttcataaataatttctaatgctttccatgaatgattacccatattaattgttgttggcacaacacgatgggcttgtggcatttgaacttcatagtattggcaatcatgaattgcgcattgcactaaatccgaacagccagataccttcaccttaaactgttggtctttaagcaaatgactttcctgcaaatgatgtatatatgacatcgtcgcattaccgcaaaattcattaccgctcataactaagtgaaaatcattgccatcatcattttgtgttgattctataaagcctacctgttcacaacatacatgtgttgcggccatcaactgattggcgatagatgcatattcactagcatcatgttttgaatgaacaagtatcgtcatattccccgaaggattatacttagaaaattctataacctgccgattcatacgacactcctttagatgtatttttagagcctcttttaccataagtaattagaggctcttatgcagttggtgcgaagcaagcaactgtattcctctaaaactgtaatttttagaagatgaacctaatattttcccatctattaggtaagtcatgctaacccgcaaaagcgaaaaccatggctcttatgcagttggtgcgaagcaaacaactgtattcctctaaaccttgtaatttttataaaaagaacctaatattttcccatctattaggtaagtcatgctaatccgcatagtggaaagcatgacttagtaatcggttgtttcatcaacatgcaaccgtaaaccttatttaaagttgcttcttgtggctctacaagtgaatgcagttgtccgttaacttcattcacttagatgcttttactgttttcacctcaactaaaacttcaaaaaagttgcagaaaacaaatcgtaactattacgatttgattatatactatattagttgagaatcattgtcaataaaggttgtaaatgaatgcacatttatattttgataatctttccataaacatcgtattctcagcacattcaagtcttttgaaaatttttatcaaacaaaaaaaccagcttcaacgtaaaatacgttaaaactagctttaagcaatacacttcatcaaataaacaaacatttatttttcaaaggttaataattccccgtcatttggtacaacaactctattacctaagtcgttagaatttataaattcattcagctctttacgagataaatgccaatgattgaccgcttccatatgcacaacaacaatttgcgcaagtggcaatgtattagcaacttttaacacatcatgttcatccataactaacggcccaccttcaaagaattgatttgcaccaccattaagaacaacaacatctggttgatacgtttttaatgctttttcaaccccttcaaaccaaactgtatctgctgctaagtataatgtcggctcttcagaatgttttaaaatcatgccgtgaacatgtcctgtcatcttcaaaatttcaccatgaccatgttgagcatctgttttaatcaactcaatttctccaatgtgtgtcacatcattaaatacagaaacatttgtaaacccataacgctctacttcactagcatcttcttcattttgtgcgtaaattttaatatctttcggcaatacttcaattgctttcggatcaaaatgatcaatatgcaaatgcgttaaaatcactaaatcgatgtcatttataatgtcttcaattgccatgggtagttctacaagtggatttttttgatcttgtctcggtgaatttggaaaagggtcaaatgaacctttatcacttaacattggatcaatcaaaatgcgtttacctccatactcaatcacggccgtggcatttcttatatgtctaatattcatgttaaatccccctatttcatatgtctgtcattgcgacaatatgcatacattgcctacttcatgccaaattcttttccactggatatcgattttaaataattattccaatgtccgcttccacgaatcatcacttaacatctcgccaggccatgtgtaagccatcacaccaccatcaattcgaatcgtctctccagttatgaatgaactgtcgtcagatgctaagaagactactaatttagcaacttcttctggtttacctaaacgtcccagcggagtcatccatttttgattttctctaaatgttttacctgcatcatcctcactcgtacctgtcagtttatctactaacggggtttcaattgtacctggtgcaattgcattggatcgaatgccatcacgaccatactcaattgcgattgattttgtaaaattaatcactgcgcctttcgcagcattatatcctgagcgatacaaatcttctgcctgtcctgaaaatgaagacgtattaacaatagagccaccttgattcatcattaaaggtaacatcattttcgtcattaaaattgtcccacgcatatctacattcataatcttgtcatacacatctattggatactcatgaattctaccagccgcattatccacaccggcattattaaacaacacatcgattcttccaaactgttcctttatgtcagacacaaagtctaccacttgttgttcatctgaaatatccacattatacgccttcgcattgtcaccgttacttttaattttatcgacagtctccgataccgcttcagctatgtctaccgccaatacatacgcaccttcttgagctaaagcgattgcagaagcttgtccgatacctgtacttgctcctgttacgactgcaactttattttccaaacgtttcattcagtcactcctatacaacatatcttaaacttacagtccttattttccactgttcaatgcttcataaacctaatagataagtctccaggcagtcttagctactctctgctatacaatttctattgaataactcaaaatatttaacaatattagtcttttcattttctgaaaattgttacttttgagagtattttttgttacactttaaatatttaacaaaggggggaatcattgatgacatcaaaacatcaacaaaaggggtctatcgtcaatcgtttcttgaatagtgttgaaaaaattggaaataaattgccagatcctagcgtcttattctttttaatgtgtgtgggcttagccattatgacgtgggttatctcattatttaatgtatctgttaagcatccaggtacgcatcaaaccatttatattaaaaatataattagccatgatggatttacgatgataatgaatgatacgattaaaaatttctcagagttcccagcattaggcttagtactagcagtgatgattggtattggtgttgcagagaaaacaggatacttcgataagttaatgatttctgttgtgaatcgcgcaccacgatttttaattttaccgactattatattaattggtattttaggtagtacagccggcgatgctgcgacaattatcttgccgccgcttgcagcaatgctttttattaaaattggctatcaccctattgctggtttaacgatggcatatgcttccgctgttggaggatttgcagcaaatatagttgttggtatgcaagatgctttggtctattcatttacagaaccggcaacacgtatcgtttcagattctattaaaacaaacgttgctatgaactggtactttatcgcagcgagtgtcgttgtattacttcctacgatattgctagttacaactaagctcattattcctagattaggaaaatatgatgacagtttaatgcatgatgaccatgaagaagcatcttcacatattactgacaaagaagcacatgctttaaaatgggcaaatatcagtttcatagtcacaattattttattaattattacagctattcctgaacatagttttttaagaaatgctaaaacaggcagcttactagacgatgcgccattaattaacggtgtcggattaattattcttgtcgtatttttagtacctggattagtttatgggattttaagcaaagaaattaaaaatacaaaagacttaggtaaaatgttcggcgatgctgtaggatcaatgggaacatttatcgttattgtgttttttgcagcacagctacttgcgtatttaaagtggagtaatttaggaattatcgctgctgttaaaggtgccaaattattagaacatcaaaacggtattgtattgatactaggtattattgtactgagtgcaatggtcaacatgttaatcggaagcgcatcggctaaatggggtattttaggaccgatattcgtaccaatgttaatccttatcggctttcatcccgcatttacgcaagtcatttaccgtgtaggcgattcaattaccaatccaattacaccgatgatgccgtacttacctttattattaacttatgcacaaaaatacgataaacgcatgaaactcggagccttactttctagtttaatgccgtattcaatcgcgctaagcattgtatggacagtatttgtcatcatttggttcttattaggtatccctgttggaccaggtggaccgatattcgttaaataacagtattcaaagggataaattaaaaatgccactatacaagatttgacctgtatagtggcatgatttgttatgatatagcgttcgagatgaaactctgcatttatatgaacaattatagtctatcactaataatatttagtctgttccaaccgttaatttggtttacaacaaagacaagatcaataatttgttcttcatcataaaatgattttagccggtcaataatttcaaacttcttaaagtctttgattgaatttaacatttctgcaaattcaagcgtcactttttcttgatcagtaaataaatctaaatgtctaaaactcaagacttcatcaattttcatttgtgttacacccaattcctttaattcttttttatggatatcaacacaataatgacaaccgttaatttttgaaattaataacttaatcaatgcactaagttcatcattaaccggtgattgatgaataaacttttcaccttggctcattacagacattaactctccattttgtttcttgtaattatacggcatttgcaatctctcctttacattgtttaataccaatccagtgatactacacttcgaacaatattggatagaatttaaaattctgtataacatcttgtcaatctatgctttagttaaaacatttagcgcttatatttaaaaaatatataaaatatgaaaacagattgaaaggatattataccttgctctacccttttttataaaaaatcacacacatttgagaaaatttgataatgtcaataaatcacgtcatcgccattgttattcggtatataatgtttttataatggctaaactattatttcatttacattaatggggttcgcttgtgttaatgtactgtacaaaactggggaagtattggtgatgatgaagtgattgatattaattgcgaaacaccttcgatagcaatgacatagattattggaagattaaatcaaaaataaagaagaccctagtggccttcttttttgtctaattcttctttgatttcgtcaggtgattttaattgatgcgctggttttagtaactcacttaatctttcactttctatcatagcaccaccaaactgataattatgttctggtgtagcataagcagtaaaattatcttttttgttttcattgatgtagccttcaattacggcatcgcccatgggtcctctttttaaacttgtgaaatgcacagatttgatggtattgggttctttggtattatgctggagatagagtgtaatacgctcctgttgttctttatagtatattgctttttgtttttctttttcgtcatatttcacttttaaataaatgactgatgcaactatacatatacataaaatgacaccaataattacaaaaacatgttttttgttcattaaagtaactcctaactttagtgactctactttttatttagttctttttttatatcatctggtgattttaattgatgcgctggttttagtaactcacttaatctttcacttttaattaaatcacctacaaattgaaagttattttcaggtgatgcataggcaacaaaatcatcttctttattttcatttatgtaaccttcaatcacagcacttcccataggacttgtttccaattttgtgaaatgtacagatttgattgtgttcggttctatagtattatgcttaagataaagtgtaatgcgcgcttgttgttctttataataaattgatttttgtttttctttttcgtcatatttcattttaaaatagatacttgcaacactaattaatatgattaacataatactagttaatattaaaattttctttttcgacatctatcaccagctcctaaaatgtggtggaattttatacagtttacatatttatgatactacaaaacacactcttacaaagaaaatctataattttaatctaggtcaaggaaaagcagccaaaagtgtttatataagatcaacgaaatattgcgggtataaagtggttaacagataaatacagtggaaattgtactaaaaattcaacttttcatttttatatgtaagtatgattaacttgaaaacaaaattaaaacggccgcatagttttagcggtcgttctttttagactctaattccttttttatctcatcaggtgatttggtttgatgtactggttttaataacgtgcttaaatttttacttttgattaaacttccaccaaattgataattatgttctggagacccatatgcaacaaaatcatcttctttattttcatttatgtaaccttcaattactgcatcgcccataggtcctctttttaaacttgtgaaatgtacagttttgatggtattgggttctttagtattatgattaagatagagtgtaatacgctcctgttgttctttatagtatattgctttttgtttttctttttcgtcatatttcacttttaaataaatgactgatgcaactatacatatacataaaatgacaccaataattataaaaacatgttttttgttcattaaagtaactcctaaaatgtggtggaaaatgaaatttttttgtaatctgtaattacgaacattatagattataaaccataacactaacatcgtcgccttcattaacttgattgttaaaatcaccaattactgagaattgtacaaggaataattgcctattatgccctcatgtcattattgccttactaacattaacaaaatcgatagctattacattaaatgtctatctcccacacctcaaacacctttttatacaggacgcactgtaatttcattcacgttaacatgctttggttgtgttaatgcatacaataccgcttctgcaatatcttgtggatcaagctttttacgatcacttggattatatgcggctgttattgctgtatctaccattcctggagaaatgcttgttactttaacgcctgtctttgccaactctttttctaatccttgagtaatagtgtgaactgctgctttcgtcgcactataaatcgtactacttttcgttacttcaaagccagaaatagatgcaatgttaataagatgtccacttgattgttctaacatagttggtaatgcagcctgtgccgtatataaagtgcctttgatattcacatcaatcatactatcccactcatctacttgataatcagtaatcttagacgataacatttgtcccgcactattgataacaatatccaaaccaccgaatgtttgttgtgcaattttcatcaattcatcgacttcttctttattcgttacatctgttggcactaccttcacactatcttgagctaattgattcgccacattttgtagtttatctttatttctaccggctaagacaactttcgccccttcttcatgtagtaatgttgcaattgcttctccaataccactacctgcacctgtaactactgctattttatctgttaatactgtcataatgatcgactcctttgattctttttattttttcagggtaaatcataaatacatattacttttaaaaagcgtatcacaattcatataacggtcataataactcgcttcattttcatagataaattacattacaagccattcgaaatatacaattaatcgttgcttatattttttatttttaaaaatgttgaaaaatcgtcacttctttattgtaaaaacattatattagtactacagttaatactgtgatttatcattcgattgaatgattagagggaggaattaaacgtgacatatcatgagcgtgttttagcattaagagcagaaagtaaaagaaccgcatttgattttcgattcgaagatttatttagcaaagaagaatggctaagtatgtctcttgcagaaagacaaaaagctgaaaaagcatttcgacacgaagttaaaaatatggacgatgtaagaatgcccttctcaagtgtccatgacgcccaagtaaaattatataatgttgtatattcttataacggcattaaacgtaattttaaacaagttgaaaatgaaggattctaatatcatttcgtttatatatagcagacatgatagaattttatatgtaaatcttgtaggtaatcgttttaaaaataatataagtatgactaaagccacatccaatataggacgtggcttttagtatcgttccagatttgtggggagttagggtttacttaattaaagggatctgccctcaattgctcaccaacgagggcaagttacatcaatcacacttcaattgccgccgactaggggtagtaatcattggcaataagaactagttagtgactaacgatttacgttccatagcaaagtgatacaaacgctcagcatcaatgtaaggcatagaatcaatagttaggtaaccatctttgatgtcaccaattaatccttgatttacaccagtgttcacgtaaatatcatagctacttacgtctgagaaaataagcgcttcaatctcttttctcataatcatcactccaatgtttatatattatttatataaactctctcgtctctctctatttattaacttcttacaagtctaatattacatgaatttccaaataaataaagaggtttgtgatgtatttcacaaatttatcactattttggaaaattaagaaatagttaattatataaaagtttaataagtcagaaaatatgataaaatgtagatgttctttagacattaaaagcttctaacatgatacggaatatgaggttcctgtatcacattagaagcttttttgttgcggtgcttatattaataatggcatgaatgaacgcatgctgtcttagtttcaggaatcggctagaatattaaacttccgttctttgaatattttttaatttcttactaatatcatccagttcattcttcgcctttttaacccaatctccttgagctacattatcaaattcacctttaaattttttgaaatggctacctatatttcacagctcactttagatatcgaacttgtttcttcagagttacttgttatattaccaggttttatttgatattcagtttgactcataacttgtatcctcacttgaagtatattgtacagaatctgtaaaataaatgttttcttctttattttctacaaaggtaaattctagattttttgaccctacagatgagccttttaaatcaccatcaccttttattaataatttcggagctttgttggttggaatattatatctttttcgaagttgcttcacattgtagtcatcgtttttcaattgatattttgcggaataacttggaacattaggattatatgaaatgtcaccatctttataatcattaatatctttaaagtcaccgtattgtacaaagaatttaaagttttcgatttcttttcttaacttgtcattcggtagtggcttcgttggtatgattttattatgttccatttttaccggataccttttttcatcatcctttggtctgccgttactgtcatctgtcatttcacttataaaataatacccttttgtggttctagtattgcgattgatatagagcaccattcctctcgtttccatatccttaccttttggctcgattaccatttcagaattaactatccaagtacctttatcaccctttttaaattcttgatctcgaaagccttctttatcgtaaaaatcatcgagatttttggttggatataattttaatgtttgattaaatgtgtctttaatttgggcgtttcgaccatttgtttttgtcataatgacataacctacaatcaatataatgagtaataccaagcatataccgagcgttaatttctttgaatgaatcatcatttctccaccttatatttttaatattgactcaatctttaatttatacaactaaagcgaaaaattattttgaacactttatgaaatttttatttcaaacttctattaaccctattcagtaggtttgaaattaatactatcagaaaaatacacattttcttctttatttcttataaagttaaattctagttctttagaacctacggatgagccttttaatcgccatcaccttcatacagtttgaagtcatatttaccaattgtaaatgacgactagatgatatatagttcaagaagcatcaaaattcgttaaaacataatcaaattttattatgttcaaaactttattttccaaaaaataaaaaagaagttaaacaaagattggttgcttaacttccattattgaattcattagtccgatttgacatagatcccgaaaaataatggctaatagccacttatagtcgagattatgaactatataatttatttattattaaatggattatatacttattgtgtttcttaatacctttttatactttaatatcttgaattttttctaaatcattactaatatcttttaattcgtctgtggcatttttcacccaagccccttgtgccgcatttttaaaatcatcttcaaagtttttgaaatgacttaccatttggtcaagtaatattttctcatcacttttcagcttattttgatgatcatgatgcatacgaacatgttcaggcgcaataacctcactaatctgttctttttccttcatttgttccaatactgctaaatctggtaaaccactaaaatcaagtcccacgcttattcatctccttcaattctgtcagattgttttagatattctcttcttaactcatctttataatcttctaatttcatttcgtgatgtcggatacgttgattcgtttctctatcgaaagattctataatacgtgtcatcctgatcatagcgtcttcactataattcattttatgtttgagatataagaaatgatcatacatttgttcacatttcttgcgtgtttgatgtcttaattcatcaatttgattgaatgcatcattcaattgttttctttcttcatcataggcattttcaagttcattaatatttttatacgtagtaaacattacatcatcccatcaatctggctcgctaacatttggtcattagaaacaattgcttcgatactctgtttaatttttgcgatatagccattacaatttttataaacatcatttaatttctttatcttatcatcaatttttcttttgggatctgtttcaagtttactttcatacgcgccaccttttcttaattcatctataacctcttcagaggttaatttttcaccaatttcatttccaacttcttgcgcttttttccagttgtctccaaatttatgtgccatcgcgtgatacatttttttcaaatgttggctttcttcattcactaattgatttaagccttcggcaatggttagtgctgttaaagcttctaataattgttgttgggaggaagagagtgatccacccgttgtttgaatccaattcgctcttaacgtctctactttatgtaatctatgcctcgtttgtttacgaacggattttaatgctttattattttcgtcttggtagcctttaactttgtttaattcagctaagattatagcctgtgttctgctcattaaaataccactcattgcatggccttctccatttttaagtactattttttctccagcagtttcatataaatgattgcggacacctgcatctaattcgtcttcatcagacacaaatcttacaatgtgaccatcgtacttttcaatcaattttttaagttcttcttgatcggcataaaggccgctcacatctttgatcgctaatggagctggattatacacaacgatatgtttaatatcattactcatacctaaaatcatcgcatctctaccgcccagcgaatgtccggtaataatatcaatatcatagtcttttttgatatttttgataaagtcttgggtatttttataatgtggatctttatctgtgacggaatgaaggccaatattgacatcggccccaatatcctttagcgtttcactcgcatctatatatccttgataagaaggaacaccaaatgtttgttttaatattgcgtctttgtgtacattagtacctgtcatacctaaagtaactttgccagtgtctttatttaaaaaggcgcttgtagtcgtacctgttttggggtccgtataacttttaagatatgaaagatttttagggaaactattttgtgattttaatatttctatttgcgtttgaatacttgcattatttaaatcgttattatttgcgttttctatttcataacttatactagatattgcgcttgtttcttcagagttactctttatattgtcagaatttatttgatatttagttttgttcatgattcatttcctcagtaggtttgaaattaataccatcagaaaaatacacattttcctctttatttcttacaaagttaaattctagttctttagaacctacggatgagccttttaaatcgccagatcctctcaattttaattcaggtgcccttttggttgatatatcatatcgttttcttaattgttggacattataatcatcattattcaattgatactttgcggaataacttggtacgttaggattgtatgaaatatccccatctttataatctttaaaatctttaaaattcccatattgtacaaagaacttaaagttttcaatctctttttttaacttctcgtccgttatgggcttcgttggaattattcgattacgttccatcttgacagggtattttttatctttattatgaacgtatccttttttgtcttctgttgtctcacttattaaaaaatatcccttagctgttctagtgttacgattgatgtaaagtaccatcgctctggattttaaggctcctccttttaattggatgtacattccagaattaataatccaagtccctttatctcttttatcaaattcttgatctcgaaagccttccttatcgtaaaaatcatcaagattcttggttggatacacatttaatgtttgattaaatgtgtctttaatttgggcatttcgactatttatttttgtcataatgatacaacctccaatcaatataatgagtaataccaaacatataccgagcgttaatttttttgaatgaatcatcatttctccaccttatatttataattctgactcagtttttaatatttacaactaaagcgaaaaattgttttgaacaaatgaatttaattgtaattattttgtattttaaatcttcttatcagaattataaaacaattaaatcaaaagataaagtttctgtgatttattattaattttaagagttatcgttataatcttttacctagtgctttatggaattttcattccaaacttctattaaccctattcagtaggtttgaaattaatactatcagaaaaataaatgttctcttctttattttctacaaaggtaaattctagattttttgatcctattgatgaaccttttaaatcaccatcacctttcaataatagtttcggagctttgttggttggaatattatatctttttcgaagttgcttcacattgtaatcatcgtttttcaattgatattttgcggaataacttggaacattaggattatatgaaatgtcaccatctttataatcattaatatctttaaagtcaccgtattgtacaaagaatttaaagttttctatttcttttcttaatttatcatcagctatcggtttcgttgggataattcgattatgttccattttcactggatattttgtatctttactttgtgcataccctttactatcttcccacaattctctaacaataaaattacctttcgttgttctagtattacgatttatatagagcaccatacttctagattccatttttttatccttcagctcaattaccatctcagaatcaacaatccaattgcctttgtcgcccttttcaaactcttgatctcgaaagccttccttatcataaaagtcttcaagatttttggttggatataattttaatgtttgattaaatgtgtctttaatttgggcgcttcgactatttatttttgtcataatgacataacctacaatcaatataatgagtaataccaaacatataccgagcattaatttctttgaatgcatcatcatttctccaccttatatttttaatactgactcaatctttaatttacacaactaaagcgaaaaattattttgaacactttatgaaattttcatttcaaacttctattaaccctattcagtaggtttgaaattaatactatccgtaaaatagatgttttcttctttattttctataaatataaactctaaatttttgtgtcctatagatgatccttttaaatcaccatcaccttttaacaatagtttcggagctttcttagttggtatatcatacctctttctaagttgcttcacattgtagtcattgttactcaattgatattttgcggaataacttggaacattaggattatatgaaatgtcaccatctttataatcattaatatctttaaagtcaccgtattgtacaaaaaacttaaagtcttcaatttcttttcttaatttatcatcagctatcggtttagttgggataattttattatgttccattttcactggatattctttttctttactacgtgagtatccttttttatcttcccataattctctcacaataaattcaccttttgtcgttctggtattgcggtctacatacaggaccaagcctctggattccatattctttccatttgtttctattgtcattttagagtgaattatccaagtccctttatctcctttttcaaactcttcatctcgaaaaccttctttatcataaaagtcttcaagatttttagttggatataagctcaacgttttgttgaagttttctttaatttgtttatccttactgctttcttcctttttcattccgcaagcgcctataaaaacagctaataatactaaatacagccaaagcctcaactttcttgaatgaatcatcatttcacatccccatttttatttttgatgcaaagttaagttcaaattccaatattaataatactagaggaaattttatgattaaatcctcgtggattttaattgttagttgtatttttcacatatcaacatcacaaattatttaaaaagcgcaaatatctttataatttttattggcctaaccaactaattaattaagataaattgcgcttatatttaaaataataacactgaaacttcaatgtctttacttattacaattgatgtttaaatacatctttactaacattcatttttcggtttacattaatttgttatatagcgatatatatcatctcttacagctttatcgagtgctaaatccatcgttactacgtttgaaccattcggcattttatcttgcttctctgaaccttctatatatccagcagttcctaaataataaaaatatataccatcatcatcttttttctgtacaaaaatatacattttaattccttttgctctatgggacaaaattttctgaacttcttttgattttagcgttctattagatttagtaaaccattttaattcatcttgacttaaaaattcatcttcatattttgtactatcacttatatcctcatgcttatcataagtgataaatattggcatttcttggcttcttatcatgtatcccatgattacagacgaaccatttttattccaattaaatattttgctaaaatcttctcttgaatatttattatataaaatcagtccatttttacctttttggtatttttcattgttatactttgataattcaataagatcttctaaaaatattttaaatgtttgattacttagagcattagtaaatgcatcgcttagtcttatcattctttcattacattctataatgggacttccatagattttttcaattcctgcgttgtaaaatgaaaaatctaaaattcttaatgaagtatctatatcatcttctgttatatccttaacttcgttcaacattttattttttaattcatcatatgttaattcattttttaaaagttcttctaaaactaaactatcgattcttttcaatccaggtgctatttgtcttgaaaagaaaaccagatttttagattcattttccgtcaataaagcatctatttttttataccttaataaaaattcgtaataattactaaatttagaaaatataacgcttggatctatagaatgttgttgtataaaatccattagtaacggcatgtgtcccaatctattttcaacttcttcataagcttttaatattaatttattttgattcaatgatactgcatccaatgaattgtaaatctgttttttagcaacttcttcaaaattaattgtagatactccattaatcgaatcgttattcgttaaaaacttcttataattatctttattttgcgattgatccccagaaagcgcaatcggaattaaataattggtcttataattaccaataaaatcaattacagtaacatactctttatttgcactttttcttaatcctctaccaagttgctgaatgaatataatactagactctgttggtctcaacattacaacttgattgacttctggaatatcaataccttcgttaaaaagatctacagttataatatagttaatcttaccttcttttaatttttctattacaatttggcgataattaacactatcatctcctgttaaagcaacacttttaatcccttttgaacttagtttatccgctaaatcataagcttcttttttgctactcacaaaaattaatccttgtaaaatttcacctgaatatccatagtaatctgtcttttgaataatataattaactctttcatcagaagttaaatatctcagtttagttacatcatcttctttaataccttgatgtacataatcagtcacaccaaaataatgaaatggacataaaatatcactttctaacgctgcttgtaaccttatttcatatgcaatattataatcaaacagttcaaatatacttaattcatctgatctttctggtgtagcagtcattcccagcatgaacttaggtttgaagtagttaaatactcgttgataagtagatgcagcagaacgatgtgcttcatcaaaaacaatataatcaaattcattttcatcaaattgcttaaaattatcatctctagataatgtttgaatggttgcaaataaatatttggcatcgacatctctatgttttcctgtcaacaatccaaaatcactatcattttttataggtaatacttttttaaattcttccttagctctatttaaaatcccctcattatgaacaataaataaaaatttattagggtttacttctctaacatctaatgcacataaaatcgttttacctgtaccagttgcagatattattaacgccttatctttggttttatccctaatagcttttaatgaccttaatgcttctgcttgcattaaattgggtacaatttccactgattttttcaccttatcagctagcagcatttgagtttgttcaacctccgctaatttttctaaggaacggtactcaaatgattctttatatgaattaatccattgctcagtcagtggggtactcttttgccataacaattcaaattcattttttacactatcaactaaatcaccatttttcatagtagacagtaaaacattatgctcataattaacctttaacgcattagatgttaaattagagcttcctattaccatagaactataatccttatgttcaaaaatatatcctttggcatggaatccagcaatatcagttaatcttacctctacattttttaatttaagtaattctccatacattttaggactattaaatcctaagtaattagatgttaatattttccctttaacacccttattgcttaaatctaatagttgagcctttaagctggctaatccgctttctgttataaaagctacagaaaaatagaacgtttcacatttttgaagttcatctataattgttgaaaggactttttcatttttattatttactaaaagcttcggtgtataattccctttatgagaaatatctttgtctataaaacctttttttaaagattgattgaaatcatttagtaatctactcatattatccctcagtcataattttattaacggctggtatatccgctggggcccaatttaatttatcaagttcgtttattgacaaccattcaatactcttatgttcagttaaagttggtaactctttgtttaaagtacatttgtatgttgttaacttaacaatgccaaaatcatattcatgttctgtagttatgactttgtctccaacaattagatcacatttcatttcttctctaatttctctaatcaaagcttctttttcagtttcattcttttcaatcttaccgccaggaaattcccacattaaaggtagactcatttcttcacttctctgtgcacaaagaattttgttatcagaaaaaataatagctcctactacattgattacttttttcataagactcacccttcaatttaaaatcatcttaattgttattctatcaaaaattacaaaactatatataaatcaatattaaaaattaatattttacaatttcctgcatgatatatcactcttacatctactccatgcattttcatacacatctattatataatacttgtgaaaagtattgtcttggggctgtgtttttttacttttggggcgtatttctttataattcattacataaatgtaagggctttagttttcatgttttattaagtctaactgagattttgaaaggatgtttagcaacaatggataaagaattatggatagaaagagctaatgatagtttagttaaacatttttatgagcagcaatctgacattgaacagcgagaaggttttgaaagtaaattaacatttggtactgcgggtatacgcggaaaattcggtcttggtgaaggtcgacttaataagtttactattgaaaaattggcattaggtttagcgcgttatttaaatgcccaaacaaacagtccaacaatagtcattcattatgatattagacatctttcaactgaattcgcccaaattattgctaatgtattagcaaaccatcaaataacagtttatttacctgatacatataaaacgacaccggaattatcgttcgcggttcgcaatcttaatactactgccggcattatgattacagcaagtcataatccgaaagactataacggcattaaagtatatggttctgatggcgcgcaattatcgactgatgcatctgagcttgcaagtcgttatatcgaagaagttggcgatccattacagattgatatacctatttcaaaacaaaatacatcttatatcaaaccttttccgaaatctgtaactgatgactatatgaaacacattcaaaatatgattggctatattcctaaatctgatttacaagttgtgttcactagtttgcatggtacaagtgttccaattgtacctgagttattaaaatctttgaatttcaatcaatttaatcttgtagatgcacaatgtaaacctgatccgaattttagttcagttcaaagtgctaatcctgaagatcatcacgcttttgatcaagcagtcgaacttgcaaataaaagtcatgcagacttattaatatcaactgacccagatgcagatcgacttggtattgctgaacgtgatgcacatggtcatatcacatattttaatggcaaccaaattggtgcgctgttacttaattatcgtattcaacaaacgtctcaattacgtcaccgcttaatgattcaatctattgtaagtagtgagttaacaaagtcattagcacgctataataatgttaaatacaaagaggtactgacgggctttaaatttattgctcaggaaataagacaactggatgatcatcaaaatatgattttcgcatttgaagagagttacggttttctatcagagccttttgtacgtgataaagatgccgtacaaattgtgccactcattataaaatacgcttctgagttaaaattatatggcaaaacattgaaagatgaattagaacagatttatcaaactgttggtagacatgaggatacattattctcgcatacgctagaaggattagaaggtaagaaaaaaattgaatcaattatgacacatttccgttcaaatccaccgcaagagattcaaggactgaaagtgaaagcaattgaagattatttaactagcgaggtttatcatttggataaagatacaacgtcacagattaattcttctaaatcaaatgttattcgtgtcttatttgacgaaggatttatcgctttacgtccttctggtactgaacctaaaattaaattatatgtgtcgttaaaatgtccggattttgatgatgtagctcaaaaaattaatgcgatgatttttagctaattaaaaattttatacatcgaaatattacatttcattttatacttatcagcccttttgaaactagaatccttatgttttcgcgttttgaaggggctaatttgtaataatttttcaaaagtatattagaaaattaattttcatgtatttttcatattaagcggtaataatataataattaataccgcgacctatttaattgttttcgcgatgaaaaaggtttagaattacaaaaataactattttaaatttagttacaaatatattttagaaaggatgtgaaataatgaaaggctctaaacaaatacttttgattatgggcattatatctcttattgttttatttatttttacactattcatcatggcacaatatgcaaaacattatgaacaaaaatccgacagttccaacgcacatactttaaactcatcatcagccataattgagcaacatactatgtcgaatttagcgtctctagatttatacgctcctgttcgtaacattacttctagtcgtgatattcatcccatttatttcatgacaaaagattaaaacttcctttttcataaccccattcattcaactaataaattaaaaattgataaaaacgtactgttttttagaaacatacatatataagatacgcattcattactaaaagacagtacattatattctatcaggaaggtgcaacaatgaccgtcaacatcgtatttagtatcgtattctgcataagtatggttatattaggcatttatgtcgcaataactaaagatttcacactaatttcttatataaatcaaacgaccattgcagataaacacaagaaccaaattgcatatatatttacgctatgtatcagtttgagtgcagtatttttaatgtcttcaattctatgctttgaatatgattttattgcattgtcattcttatttttaacgatagcattattacttatcgcattattctacgtttgcttttataaaatcacaaaatatccataaatgtttgcgatagtgtgttggttagatttattgatgcgctgtcattaagtaattgtttgcgaaaaaaatacaaccttgtacgaatacaaagttgcattaatatagaatcatttatgctttttaatatcacaaattaaattgattaaactagctaaaatagtcaaaattggaatcaagattacatatatatcataacctctagatattagtatacataatataattagcgaccctattataattgctaaattataagccaaactaattttatatttcatttcaattcccaccttaatagcattgattaaaattctattttgtttgcatagacttcttaacaaactttaacccagctaagctaagcattgaaataattgcacctcctgatataaatatattacttaagcttagtaaaggtataattaaacttatcagtcctaagataatgtatccgctgcgtaattcgatgtagatgagatactaaatactttccccatcaaatgatttggcgtttttatttgaatggcaactgatcttgttagtccctctatagattgtccaagtcccactaatgttgcacctatatatagtatcgccacacttggaaacacattaattatcgataagccaatcccccaaactaaaacaccaatactaaatttaaagattaatcgtttttctgatagtaaacccataatcaatgacattaataaagatgctatacctaaacatgatgtagctagtccatatacaccaacgccctcttttaatatattggaaataaacaatggtaatgcaacacgccaaaggccagtattaatcaatatgcaggcaaattggatgattatgataaatggaatttctttagattgtttcaagaattcccaagtttcagaaaaatcttcttttgagtgtctatcaatcatgttgttatttgtatattttaaaagtgcattaaaaataaatcctaaaaatagcaatatactgcaaataaaaaagacgccaacattaccaactagtattacaatgacaccaattaaagcaggtaaaataatatttgagcctctttgcaaactatcgattaacgcattacttgttgctaaatgctcctcatcaataatttcaggaagaattgccctaaacgcaggatccgtatagcagttaataatggtgatagctgtagatatggttagaagcgtcagataatttaaatttgatgttattgcaagtaaaggaataattattataatcaaacttagtataagatcagatagataaagtattttctttttattatgtttatcagaatatgcgccaccgaaaataccaaatataataaatggaagtgtttgactcataaccatcattgataattttaaagatgattggtttgtcaattcaacagtaaaccaaattatttgtaacgaaaacagcacaaagcaactccgacgtaagaaattaccaatcaataaatatgtaaagtttctatttttcaaaacttctaagtacaacatatttatcacctctcataaaaataattgaatgcatccaccagccttttttagaccttcttctaaactctctttatccaaagcgcaattaattctaataaaattaagtcagttaaatatcaattatttcgaaatatacatactacttgaaacaccatacataccccccaaaatgactactcagaggttatattctactaattatgattatattaaatatgaaaatattatcaaaaaatcaaatttataacaaaaatacaccccttaaagttaggtctttcaatccaacttttggggtgtatatcattctcatcatattctaggttgtttttaacaaactaaatatagtgaatgcaaatcaactattatttaaattatgaattattttaattctttcttctacgagccaataacattaatccagcaattccaattatactactaaagatcaaacctttttgcgtgctttctaaacctgtttttggtaattctgctcgttttttctcttgattagctactgattctttagcaattttagattttttaactttatcatttttatccattgaatgaactgggccatttggttttgctctgtctttcgataatcctggattgttaggatttactgggccacttggatgagttggtctgctcggcttctctgggttttcaggtccttttggatcttttggtttctctccaccgaactctacaatcttatctactggttgttttgtgatctcttctgttggttgaccctcgccaactttttcacctgttaatgggttcactgtgattggtgttgtgattgtcttacttcctggttgtccttcttgtttcactcgctcttcaccaggttgtaattttggattaaactcacgttttgtttcaaacggtatctctactgtttttgtttctggtgtacccgtttttggtccgtgtttaatcacatcatccactggctcttcgatcacttttcctgtgtctggattcttgattcctggtttacctggtactttttccgtttgatctgttggtaagtttggatcaaagatatctttatgaccttgcggtattttctcgccaccgaattctgttaattcattaactggatcttttgtgatttcttctttcgattcacctttactaataatttctccagttaatggattttttagtgttggcgtcgttattgtcttctcacctttttgtccttctcttgttactttttctgtccctggtgctaaatcaggattaaatttacgttctttctcgaatggaatttcttctttttctacaatcgagtctccttttacaggtccatattttgttacgctatcgaccggtggtctaactacatctcctgtttctggattcttaattcctggtttacctggaacttcctctttctctcctgttggtaacttcggatcaaattcgtctcgatgacctggtgttatcgtttctggtccgtattctgttaattcattaatcggatcttttgtgatttcttctttcgattcacctttactaataatttctccagttaatggattttttagtgttggcgtcgttattgtcttctcacctttttgtccttctcttgttactttttctgtccctggtgctaaatcaggattaaatttacgttctttcttgaatggaatttcttctttttctacaatcgagtctccttttacaggtccatattttgttacgctatcgaccggtggtctaactacgtctcctgtttctggattcttaattcctggtttacctggaacttcttctttctctcctgttggtaacttcggatcaaattcgtctcgatgacctggcgctattgtttcaggtccgtattctgttaattcattaatcggatcttttgtgatctcttctttcgattcacctttactaataatttctccagttaatggattttttagtgttggtgtcgttattgtcttctcacctttttgtccttctcttgttactttttctgttcctggtgctaaatcaggattaaatttacgttctttctcgaatggaatttcttctttttctacaatcgagtctccttttacaggtccatattttgttacactatcgaccggtggtctaactacgtctcctgtttctggattcttaattcctggtttacctggaacttcttctttctctcctgttggtaacttcggatcaaattcgtctcgatgacctggtgctatcgtttctggtccgtattctgttaattcattaatcggatcttttgtgatctcttctttcgattcacctttactaataatttctccagttaatggattttttagtgtcggtgtcgttattgtcttctcacctttttgtccttctcttgttactttttctgtccctggtgctaaatcaggattaaatttacgttctttctcgaatggaatctcttctttttctacaatcgagtctccttttacaggtccatattttgttacgctatcgaccggcggcctaactacgtctcctgtttctggattcttaattcctggtttacctggaacttcttctttctctcctgttggtaacttcggatcaaattcgtctcgatgacctggcgctattgtttcaggtccgtattctgttaattcattaatcggatcttttgtgatctcttctttcgattcacctttactaataatttctccagttaatggattttttagtgttggtgtcgttattgtcttctcacctttttgtccttctcttgttactttttctgttcctggtgctaaatcaggattaaatttacgttctttctcgaatggaatttcttctttttctacaatcgagtctccttttacaggtccatattttgttacactatcgaccggtggtctaactacgtctcctgtttctggattcttaattcctggtttacctggaacttcttctttctctcctgttggtaacttcggatcaaattcgtctcgatgacctggtgctatcgtttctggtccgtattctgttaattcattaatcggatcttttgtgatctcttctttcgattcacctttactaataatttctccagttaatggattttttagtgttggtgttgttattgtcttctcacctttttgtccttctcttgttactttttctgtccctggtgctaaatccggattaaatttacgttctttcttgaatggaatctcttcaactttttttctaattctgttattgtttttggcgcttctggtgtaaaagtaaactctgaacctttcaagtcagttctcatccagccatttgcatttatcccttgattaaggccccatctttgactagatgtaattaagaaattatatgcctgatttttagataaacctaaatctgttattgaagtctcccaagttttaccagcatattctgctctcattttaccagttgaagcaacataagttaagatgacatcatttaaacgttgcccatgaaactttccatctgatgtattagttgaattgtccgcatagtttaaaaaattagtttttgatttatcaatattttctccaaccatttgtgaattaccagaactgtcatttttcacaaaagctccgtatcctctataaccttgtccagcttgcttttcagttttgtccatggaacttgtataaatgtatccagtatcaattttaaatccgcctgaatttaccagacctttatccccaaggattccaccattagttaaatattcttctgcatttcctttactaaataagaacccccaaccatcagcacctgtggtatttgattgatggttatttgccactctaactttaaaattgaaatccttactaaaatctattttattttttaattgtaaagctcctatcaaaccattactttcattaccaacattaaacctggttacctctgatacccctaaatctgttgggtttttttgtatatcaacacttccgtaaccttcaaaatgttctttaccttgaattgtaattggggtagattcaactacatttttagaatctcttgtaatatcaaaagagccttcatcaacagaacgagcttttctaaccttaggtgcctctgcgttatgagtgactgacgatttcggctgaacttcagcaacattagctacttcttttggtgtatcctccttttttgatatatcttcagcttttactgatgcttcatgttcgattgtgtctttgtttgaagttacttcagatttagcttctacaccttgtggtgcagtgtctttgtttgttacttcttcaatcttcacttcttttgattggacattatcttttaatgtagttggattctcaatattgttttcagctgcttctgcttcttgttgagttcccaaatacattagtgagccaattaaaatagatgctgttccaactgtaaattttcttattgaatatttattcaatttatttgatagaaaatctactcttttatttaccggtcctttcttatctctcatttgcatactcctttttccatattttccactttacttacagtgaatttacatgtaattttacaaatacaataggagttgcacaatggaatataacacttatctttataaaattattttatatattgacacacttaaaacaatctacaactaaaaatattatttttagttttcaatgaataattcattcttatctgttggaaaaacccatcaactcaatagcattgaatttctaaaataaaaaataccttaacgcatttaaaaatacatttaactgcaccaagatattaaaatctcgaaacatactttatgtttcattaatatttatttcactcaaaagatttttaatataattgtgttgttttacagaaacaacaatgattacatttctactatcatgtgggtctctacatttattcaagtaacccttttttgataattcttttacgcttttaacaattctagattggtctataccgatataacttataatgtctctcataaaatatttaccttcatcatttttaaatacatctaaatatgctaatactaaataattatctaatgtaagacaaaaatatttttttaaatatttacgcagctcatatgtagttaatactcttttcattaatttaatattgctcttgcttttcaaatcattcatcaagtcttcatcccttacttttaattgtcacgtcaaataatatttgtctttaactagtaataactccaaatatatttagtttgtggtgctagctataaacacaaatgaatcataacactatattttgattttgttcaattgtttttgtttttggataataaatgaatttgtcatttgttattccgtgatttttagttatttatattttatatatattatatataaaaatatttaggttaacatgtcttcaaaagagattgcttttatattactttaaataatataaagtattgggacatcagaaaatagtaggagaatgtaaggtggactatcaaactttcgaaaaggtcaataaattcataaatgtagaagcgtacatattttttctcactcaagagttaaagcaacaatataaattatcattaaaagaattgttgatattagcatatttttattacaaaaatgaacacagtatttcactaaaagaaatcattggtgacatactttacaaacaatctgatgttgtaaagaacattaagtcactatctaaaaaaggatttataaataagtctagaaacgaagcagatgaacgccgtatttttgtttcagttactccaatacaacgtaaaaagattgcttgtgttattaatgagttagataaaataattaaaggatttaataaggaaagagactacataaaatatcaatgggctccaaaatatagcaaagaattttttatactttttatgaacattatgtactcaaaagattttttaaaatatcgatttaatttaacatttcttgatttatctatcttatatgtaatatcatctcgaaaaaatgagatactaaatttaaaagatttgtttgaaagtattagatttatgtatcctcaaattgttaggtcagttaatagattaaataataaaggtatgctaatcaaagaacgatcccttgcagatgaaaggattgtgttaatcaaaataaataaaatacaatataacactattaaaagcatattcacagatacttccaagattctcaaaccaagaaaatttttcttttaaatttaaacagatttacctcttgataaaataaataagcaatcataatacttctcaatttagtataaataaaaatacataattaactttcttttgtttttatattatttcaataccctactatatatcacaacacataaattaagcatgacactcattcaatttagttcaccatttcgtgttccaattttattgagtatcatgcttttaatattataaacctaatgctttaataaatcgtgttaattcttctcgcatactgtcatctttcaacgcatattctattgttgttttgacaaatcctaatttttctccaacgtcataacgttcgccttcgaagtcatatgcatacacttgattatcattgttcatacgctcaatcgcatctgttaactgaatttcgttacctgcgccttctttttgcgtttttaaataatcgaaaatttcaggcgttaatacatatcggcccataatagctaggtttgatggtgccgtaccttgtgctggcttttcaacaaactttttcacttcatactgacgtccatttttagttaatggatcaataattccataacgatgagtatctgcttccggaacttcttggacacctataactgagtgccccgtttcttcataaacgtcaatcaactgtttcactgctggcacttcagattcaacaatatcgtcacctaataataccgcaaatggttcattgccgataaattgacgcgcagaactaatcgcatgccctaaacctttttgttctttctgtcttacataaaaaatattcgcaagttctgtcgagtattgaactttttctagtaattcagatttacctttttcttttaacaccatttctaattctttttgactatcaaaatgatcttcaatcgcgcgtttgtggcgacctgtcactataataatatcttcaattccagctcttgcagcttcttcaacgatatattgtattgtgggtttatctaagataggaagcatttcctttggcatcgctttagttgctggtaaaaatctagtccctaaaccagcagcgggaatgattgccttttttatttttttcaaagttaatgtgctccttttcctaagtattaaatctatgtatcaacgtcattttaacactaattagaacgccttcatagtgtcattgagtatgtaattattggttctccaccaaatgtggtgggtatataatttaaagaactattttaaattacaacttttagagtttttattattaggcggccagtccattattgggcttggttgtcttctttttttctcctttgtataagctgaaaatcatcattatacgtgctttaaagttgttgaaatttctgtaaccaaaagaaattcgcttgattaattttatcttattattaattccttctatagcaccattattaaatgctgggtaataaattgtatttcttaacatcctttgatgttttctataatatttaaccactttccatacacctttactcacagactttttactaactgaatttaaacgattaataaatttaggccaattacataaccttagatcttttcttaatccttggacaagttcgtaggagcgtcgtagtatatcgtcttttgaaagcatgaattctacaatgtcagatgagcgtttataagccttaaaagatttattccatctgtatttactaaatatggttttactagtatccatcaatagaactttccagttattcttaaaaattgtataattaggtccttttttattacggtattcattcataacttgtacacgatacttattaagttccctatttaaatgttgaacgatatggaatctgtcaaaaataatagctgcattaggaaataggtcgcgaaataatcggacatagggttcatacatgtcaatagtaaccgtcttaacttgttgtcgattttttaaatcgaatcgctcgaaataggcacgcaagaatcttgtagttctattttctaaaatatctataacatcatgagtatcattatctataaaaatgaaactcattgatccagttacatttttaacgcttttaaattcatccatagcgatgtgttctggcaaacaattaaacggtttaattcgtaatgaattagccgctttagttctaatacgacttacagtagatggagagatacagttatcttctgcagtatcaatctctgttttaactttagtagcttcttctataactttttgagtaacacatcttgagataaaacacgactcatcaacaattgacgttttagcagtaaaagtgccattgcattctaagcatttaaaacgttgtttagctaagttgaggtatgtgttatacccttgagttttaagtaaagtaatacgagaaacacgcttaccatgtttatgaatttgtccttcatttttaactccacaacaataacaggccgaaggcttatacgttagtacagcattaaccactgttgctttttttcctttgataatgacgtcaatttcttggtttatatattttatattttcatcttttattcttagtaattctaaggtatcattacacataggcgcacttgtctcctttagtttgggtttggtcactttaaattatagaggcaattgcgctttttgtgtattaaaaaaagcaggaagttttaccttcccaccataaaatatgaagaacctaattatttcttgggaaatttgatttaattttaaaaaaacaggtttacttcatataatttatgaaataaacccgtcaatttttgtttaattatgctttgttattctttttatttctgcgtaataatactaaacctagaatgctgaataatccgccgaacaacatacctttgtttgttgattcttctccacctgtttcaggtagttcagatttcttagattgtttttgtttagttggtgccactgctttaaccttttcattgatttcaataacaggtgttactaccttaccttgttccactggtttagaaggttttttaggttcttctttagcaggtggtactggtttaccaggttcagatggtacctctggtgttggtggtactggtgtttccggctcacttggtacttccggttttggtggcgttggttcgcctggctcactcggtacttctggtgttggtggtgttggtgtttccggctcacttggtacctctggtgttggcggtgttggcggcgttgtatcttcttcaatcgtttgttgaccttcattttgaccacttacttttggaagtgtatcttcttcaaaatcaacactgttgtgtccaccaaattgataattaggtttatctttgtttgtatcttcttcaataatttcattatgcttattgaatccatgaatttgtggcacactgtcgaagtcgatatcaatgatgttaccaccttgttcatacttaggcttgtcttcttctgtgtcttcctcgaatgactggttaccattattttgaccatgaatttgaggtacactgtcgaaatcgatatctacgatattaccaccttgttcatatttaggtttatcttcttctgtgtcttcctcgaatgactgattaccgctattttggccaccttcataacctaattcactcttaatatcaacgtggctattttcttcgatttcatcaatcacgccataattaccgtgaccattttcagttcctaaaccagaatgagaaatatgatgattgttttcagtaatttcctcgattggcccttgtgcttgaccatgttcttcaggtaattcatccactaattcaatcagattactttcagttgtatattctttcgtatcttcaactgttgtatggtcgctcactgcgccagttacaataccttttgtagactcttcgtcaaattcaactaagttagactcagttgttacttggccaccacctgggtttgtatcctcttcatattcaacaacatcagcgtgatgttttgaattttcatgtgtagattcttcaaaatccacatgaatagaatcttcttcagtttcaataataccttctgcatgaccttctgcaccttcaacagctgtatgatattcaaaatcaattggcttagaatcgttactttcttcgattgtaccagtcaattcatgcttctccactggtggctctgatttaatgtctaaatcaattggttcactcttctcaatgataggatcatttggtttatctttaccatcgcctttagcattattagagtaaaatgcaacaccgttgttccaagttaattgaactggataatacgggtaataaggatagtatgggtagtatttatgatatcctgaaagatgtgttcggaaatttagatccttagcattttgatcatattcaccttcatatttaattacatagtctttcgaattatctaaatcgccaaggttcaatgtgtacccaccattacttgtgtaagatagatttactttttcagtcacatcttcaaatttactggtatcatcaagctttgcataaacactttcagctaattcatctgaaccaatgtgtttatatactttgactgttggattattagcactttgtttatatccagatgttacttgaccagttactgtgacagaagttaacgactggttgttaggcttcacatatgcaaaatggctaaatttaccctcttctttattcaaagtatcaatacgaccattaacagtaacacccattctatctttaacgccgtctaaatatttgatatcaaattcttttgagactttattttgacctagtgttacttcaactttttgactcccttgctttgtcactgttgttgggtcaatgaataggtttaagtttaattcagcagttaaatcttttttgttatttatataatcagtaaatgtatagcgaattgtacgttcatttataacttgaccatttgccataactttatcttctgttgaactttttatctccggaactttacgcagtgttgatataccatgtgtttcaacattatcacttaatgtgaaatcaaaataatctcctgccttaattccttctccaaatttccatttgtattttaaagttactctttgagcattatgcggattaacaatattcgaatctttattatgtccttctaaagagctttcagtaacttccactttatttgttacatctgtacctgtcgctttagcttcttccgctacttctttctctgaaactgctgtaacgtcagctgatcttttcattcttggtttaatttctgagacgttacttggttgagctatgtcaacttgagttcctgtagtttccttatcagcaactttttctgatggtaaatcttcttgtgatttcatttcggtttctacttttggtgcttgcacagttgttggtgcttcttctgttgttacttgagttgattttgatggttgctcagttgatgtcgcgctgtatgattgtgtttcatctattgtattaacgttatttgtagttgtttgtgtttcgcttgctttactttcagtagctgaactcccactttcctctactgtagtattgttttgttccgatgctgcagcttctttttcttgtcccattccaacaacgatcattgttcctaagaatactgaggccgctcccaatttgtgttttcttatgccgtatctaagattgcttttcactataatattctcccttaaatgcaaaattcatttatttttaaaactcaataaatgcaattctatattgttcggtttttaaaagcaatgaaaaaaagcgagttaataaaaagttaagattgttgttaactttatgtataatgagttttttattatttataactcacatatatattgcatgcaaaactcttaaatcccttgatataacaggcttgtattttttatacttattttttaaattaaattcaaattcatctaatttaaagcaatatactaaagcatacataataatcgcctgtacaatgcatcattaacaagtcactgaaatgcctttcattgtattaataacgtcattataattttatatcgttcggtttttgttttattttaatgattatttatacagaaacagccgtatttcaagacgacattttaagtttaactaaatttgcatctagttaataattgcatttatcaaatttgtcttattgattcaatctaatttgtactaacaaactagttttaaattctaactttatctctcattttgtaatcaatcatcagacataaagcgcttcagcaatcagaaaacactctaattttctattagaaatttgatttaatctaaaaaaacaggtttacttcatataatttatgaaataaacccgtcaatttttgtttaattatgctttgttattctttttatttctgcgtaataatgctaaacctagaatgctgaataatccgccgaacaacatacctttgtttgttgattcttctccacctgtttcaggtagttcagatttcttagattgtgcttttttagttggtgccactgctttaaccttttcattgatttcaataacaggtgttactactttaccttgttccactggtttagaaggctttttaggttcttcttttgcgggtggtactggtttaccaggttcagctggtacctctggtgttggcggtgttggtgtttctggctcactcggcacttctggtgtcggtggtgttggtgtttccggctcacttggtacttccggagtcggtggtgttggtgtttccggctcacttggtacctctggtgttggtggcgttggtgtttccggctcactcggtacttctggtgtcggtggcattggtgtttccggctcactcggtacttctggtgtcggtggcgttggcggcgttgtatcttcttcaatcgtttgttgaccttcattttggccgcttacttttggaagtgtatcttcttcaaagtcaacactattgtgtccaccgaattgataattaggtttatctttgtttgtatcttcttcaataatttcattatgcttattgaatccatgaatttgtggcacactgtcgaagtcgatatcaatgatattaccgccatgttcatatttaggcttgtctttctctgtatcttcttcgaatgactggtcacctttattttgaccatgaatttgaggtacactgtcgaaatcgatatctacgatattgccaccttgttcatatttaggtttgtcttcttctgtgtcttcctcgaatgactggttaccgctattttggccaccttcgtaacctaattcactcttaatatcaacgtggctattttcttcgatttcttcaatcacgccataattaccgtgaccattttcagttcctaaaccagaatgagaaatatgatgattgttttcagtaatttcctcgattggtccttgtgcttgaccatgttcttcaggtagttcatctactagttcaatcagattactttcagtcgtatattctttcgtatcttcaattgttgtatggtcgctcactgcgccagttacaataccttttgtagactcttcgtcaaattcaactaagttagactcagttgttacttggccaccacctggatttgtatcctcttcatattcaacaacatcagcgtgatgttttgaattttcatgtgtcgattcttcaaagtcaattggatttgattcctcagaggactcagtgtatcctccaacgtgacccgcttcactatccacagcagtatggtaatcgatatcaatagctgatgaatccgtttcttctattgtttcaatatacccatcaacataaccaccctcaccatctatagctgtgtggtaatcaatgtcaagcggtgtattgtcttgattttcttctgtttcaataatttgcttggcatcgtactgcccgctcatagttccttttgcagtatcttctttatattcaaaatcattatcttgaataatttgtccatttttaccattgccgtcagctttattgctatataaaactaaaccattatcccaagttaaacgatatcccccataaacatagtaagatttatatgctcgttctggatacccatataattcagttctaaaattaacctgatctgacccttgcaaatattcacctgtataatgaatgacatacgttttatccaacttatctaaattcaatgagtaactaccattgtcttgcacactcaattttccattcatttcctttgttacatctttgaatttgttagtatctgatgtatttgcataaacactttgtggcaattcatcttttttccctagatattcatatactttaacagtaggttgtccaccagctaaattactaccttcagtcaacgtccctgttactgatacagtgtttgactggtttccattcattggcttaatataagctatatgtgtaaatttattagattctttattaaatgtttcaattgatccatttacatttgtataactattgctaacacctggattataaacaactggtattgttttttctgtttcttcaccatttaatttagaagtaatcttttgttctccattgctttgtacagttttagggtcaataaataagttgatttctaaattagctgttacctctaccttgtgttcaatttcgttagtaaatgtatatcttatgttaccattccctaagatctcacctgtagccattacaactgagccatttttaatctctggtacctttctagctgttgaaaccccataagtatttacattatttgataatgtaaaatcaaaataatctcctctttttaatccatctgcgaatttcaatttgtatttcaatacgacacgttgaccagcatgtggctctactttatttccttgaggtgcctcaatagaaccactttctactgtaactttacttgtaacatctgtgcctttaacttctgaaacgtcactagcttccttagcttccgctacatctgctgatcttgtcacacgtggcttactttctgatgccgttcttggctgtgccacttcaacttgtgtttctgtcccttgattttgtgtaacctttttaggtgttaaatctacttgtctttgatttccgctattgtcttgaggttgtgtcgtttccttaacttgaggtttctcttcttctttaactgtttctacatttgctggttgtgcagtttgtggtgcttgtactgcttttggtgcttcttcagttgttacttgtgttgcgtttgacggttgttctgttactgttgcgttatatgattgagtttcttctatatgattaacgttagtagcagttgtttgtgtttcacttgttttattatcagtagctgaattcccattttcttctactgtagttgtcttttgttctgatgctgcagcttctttatcttgtcccatcccaacaacgatcattgttcctaagaatactgatgctgctcccaatttatgttttctaatgccgtacctaagattgtttttcactataatatctccctttaaatgcaaaattcattaatttttttaaacttaataaatgcaagtctatattgttcggtttttaaaagcaatacaaaaaagcgagttaatgaaaagttaagattgtcattaattttatgttaattgataattttattatttgaaatatacctataaattgtattcaagtcatcataaacccttgtcacacaaggcttgtattttttatacttatttttcaaattaaattcatcattatctaatttaaaacaatatactaagtgtttcataattatcgcctgtacaatacgcacaaaaacatgtcttgaaacgcctttcattacactaaaatccccaatatactttttatatcgttcggattctgactatttcagacgattttctgcataaaaataaacgtgtttcaaggcaatatattgcaattacctaaaaacacgtttacttaatatttagttaaacaaataagctgatgaatagaatgaagatgatacctgaaacggaaataatcgtttctaataatgaccatgttaagaatgtttcttttacagttaaaccaaaatattctttaaacatccaaaatcctgcgtcatttacatgagacaaaatcacactacctgcacctatcgcaagtacaactaatgcaacatttacatctgatgattgtaataatggtaagacaatacctgtagttgaaatcgcagctactgtagccgaacctaatgcgatacgtagcacagctgcaacaatccatgctagtaaaattggagacatctctgtaccttcaaacattttagcaattgtatttccgacaccaccgtcaattaatacttgtttaaatgtaccgccaccgccaataatcaataacatcattccgattggataaatcgcattcgtcactgattccataatatgattcatcttacgttttctcattaatcccatcgtaacgattgcaaataatactgctattagcatggctgtccctgctgttcctatcatataaatgatagattcaaatagatttgtaggtttgtcgtgcccagttacaagttgcgttatcgtagacactaacattaatatgactggtaatgttgcagttaataaactcataccaaatcctggcatctcttgatccgtaaattctttttgtgcacctaacgctgaaatatcgccttctcgtgtatacgcagacggaatcattttttgtgcaactttgttaaatataggtcctgcaatgagtgtaactggaatggcaataatcataccgtacagtaatacatctccaacatttgcctttaattcttttgcgatgactaccggtcctggatgtggtggtaaaaagccatgtgtcacagataaagctgttaccataggtagtcctagttttaacactgaaacatttgcgcgttttgctactgtaaatactaatggaatcagtaagactaaacctacttcaaagaacaatgcaataccgacgataaatgctgcaacaagcattgcccattgtacatgtttttgaccaaatttttgaatcaacgtgtctgcaattcgagttgcaccaccaccatcagcaagtaatttcccaagtatggcacctaaaccgaatattagtgcaatgtggccgagcgtactgcccatccctttctcaatcgtctccataattttagtcaatggtatacctagcattaacgctgtaatcatcgatgtgataattaatgaaataaatttatttaatttaaacccaataattaatactaataaaataacgatacctaaaacaacactgattaacggccatatttcgttaaacatgacattcccctctttctcttttcaatagaatgtaacaccgtcgtcgcgcacgtattccagataatatatagtagtcatggcacaacaactttatctaagatgcttgagtgacgtatttattgtgttttattttcagccatatgttggcgttgaaaatctgcaatttgttcataattctctgttaaagaacgacttaaattgataaaaatggatacgagctcttggtaaacagcgacattttcttcaaacggcgtatgattatttgtagcaccgaccatcgatgaaacgattgaaaaatcttcaatgtcacctacagctttaagtccaagcacgcaggcacctaagcatgaactttcataactttcaggaaccactaactctgtgtcaaatatatctgacatcatttgacgccatacttcacttttcgcaaaaccacctgttgcttttatcatattaggcgtttcattcattacttcaatgagtgcaaggtagacggtatacaaattgtaaagaacaccttctaatgcagcgcgaatcatatgttcttttttatgagataaagttaaaccgaagaatgaacctcttgcatttgcgttccaaagcggcgcacgttctccagctaaatagggatggaatattaaaccatctgcacctggtttaacacgctttgcaatttgagttaagacatcataaggatcaacaccgagacgtttcgcagtttcgacttcactcgctagcaactcgtcgcgcaaccatctcaatacgacaccaccattatttacaggacctccgatgacgtagtggtcctctgttaagacataacaaaatattctacctttgtaatcagtacgtggtttatctatcacagtacgaatcgcgccagatgtaccgattgtgacagcaacttctcctttaccaacactattgacacccaaattagaaaggaccccatcactcgcaccaataacaaacggtgtatcttcattaagccccattaatgttgcataacgttctttcatgcctttcattacgtacgttgttggcactaattccgggaacatttccttggaaataccaagcaattctaatgccccaacatcccaatctaatgtttctaaattaaacatccctgttgcggaagccattgaataatcaatgatatatgtatcaaataaatgatagaaaatgtatgttttaatatctgcaaacttagcagtacgttgaaatacatcttgccattcatgtttcatccaaaaaattttcactaaaggcgacataggatgaataggcgtacctgttcgctgataaatcgcattgccatcatgcacttcatttattactgttgcatattttgcagcgcggttatctgcccaagtaatattatttgttaatctttgatgttgctgatccatcgcaatcaagctatgcatttgcgcactaaatgacacaaatttaatatcatcttgattaactttcgattccctcattatgtatttaattgtcattaataccgcatcaaataattcatctgggttttcttctgagacatcaacgtttggtgtgtgtaaatcatagccgatttgatgtttcatgataaaagctccattttcatcatataagactgacttggtactcgtcgttccaatgtcgacaccaatcatatatttcatgataaatccttctttctttcattttaattcaaccaaaatccttcaatatctttaccaacatcgtcaaaatttaaatgaaacgcttccttcaaaatttgactgtcgtattgttccactgcatcaataaacacttgatgattatgatgtatgcgttcaaaatcttgcgggttctgttgcatacgttgtcgcatggatgttaaaacgagtgccatcattactggttttaaatgactccaaaatgagtttaaatattggtggttagatgctttgattaatgtttcatgaaattcaaagtcatgcttcgtaaatgattctgcatcttcaaattttactgccactttcatcatttcaagttgtttcttcatttcttttacgataggtagtctctcttgatttttaactcttgaaaatgcaaatgactctagcatcagtcgcaaatcgtacatttctttcttttcttgttccccaaacggcaacacatgtgcacccattctttctaattggatgagttgattttgttgcaataatttaaatgcatctcgaattggcgaacgactcacattaaattgctttgccatttgattttcagtgagtaacgtaccttcagctatgtgaccattcacaatacctaagcgtaattctgccgcgataccttctccagttgtcataccttccaaccatttctctggatatccatacatcatcaaagcactccttcattacatgacatacttgtatacaagtatgttaatatagttcttaagtgtttgcaagcgctttctttatgcgaactaaaatagtgaccacccctcttcgatgtaaatttaaagggaatgatcactatcacacgaatgatttaattgttatgttgtatgtgggatatttctaattgttctgtactcatatgcgctttaggtacttcaatgcaataatgcgtttcatgacagttcggacattcgaatcgacgtgttgtcgctgtatgtttcgctttgataactgcccacaaagatggtgagaatatatgctggcagttaggacataaataggcaaccttttgttggtaataaaaagtaacaccaatgccgtaacaattcataaatggtaaagcaattaaaaacggccatttgtttttcatcaagattgaactcataatgctagaatattgaattattcctataataccagcactaatccaaatgttacgacgaatacttttcatttcagctgatttactcatgacatgctctatgtcttttaagtgtgtgattggagacgtcgacgcttcatttacgtaatattgaacatttttaattttgtttaataccgcttgttgctgtttgacttgttggttaatttcttgttgtttcatggttagtaaggtattgagtgtcttcaaagtaccttcaccttttagcaacatatctatatcgcttaacgcacaacctaaatctttaagcgataagattaactctaatgtttgtcgctgttgttctgtatacacacgacgctttccttctgtaaatccttgtggtttcaaaatacctttgcgatcataatattgaatcgttcgtgttgtcacattgcataattttgcgagttctccagtcgaatagttagacatagattccacctcctacaatcaccatagttgatgacccgacgtcacgagcaagtacaatttccatatttttaagaaatttattatacttggcgtcttatttttatgatttcgtaccatgttgatttacaaaatcactcaaattaagcaacactcctactaaacgtctactctgttatttcagaatgaatttgttgtaatttatcttcaacttcagtaatctctgtcgcacattctttcagtaaatctcgatacttttccgtctctgcattgtttttataacgtattttatgttctaaacttgcccacatatccatacctatcgttctaatttgaatttcaacaggcaatacctcaacgcgttctgctaaaaagactggaatggatacaacgatatgtaaactgcggtaaccattttctttagggtgctgaatataatctttacgttttatcaattgtacgtcttcttgtttaagcaacatctcttcaatcaaataaatatcatctaagtaattacatactacgcgaattcccgcaatatccagtatgtgttctttggcagtttctgcactaatctgtaatcctttacgattaagcttttctattaaactacgcatttctttcacacgtcgctccatatgatgtataggattgtgtttataaatgtgattgaaattgtcatctaaaatactcagtttagtgcttatttcctttagtgctgacgaataaatatgatctaactctacgaaacctaataacgtatcaaatgcttcatcaccattttcaaatttacttaaactatttttaaaatcatgtcgcaaatcctctaaatatagtgatggttttcgatctacatacatttttatactaacctccgatatataatcatctttattgtacctaacattttattaagataatactaatacactatcgaactttgggctgatactgaaacagcacaaagaaactcaaacaatccgaattatgtatcaaaaccttcaattacaggaagtaattttaaaatgatttaacgcaaaaaaacacctgttaccgttatataggtacaagtgcttaattgatagagatgttatacgtctttaaatgattccacaacttttggatgtgcaccatccataagcggttctctttgtcgaacgccaccactttggttgccaattgattcgctatcaaagtacgatttatcttgatttgattgttcttgaatatgttcttcattatcagttgttgcatattcactatccacctctgctttttccattgttgctgtatggaattgtacgaagttctcttcttctaatgctttgatttcttctttcgataacgctcgataccaatctttcgcttttttcgccgcaataggaacaacatctttttcaagatatccttcttttaacattgcattcgcaatttctatcgctttttgccgtttaattacttcaaattctttccatttttcggggtaacctttcattgtaaagggcatttccttaacctccaatatgttataattcatgttatataccaccataattataaaatgaaacatattaaacacaattttttagactcccgtcataataacttcagacaaacgttagtctgacctgataaatattttattttaaacgttcttgtctctctcacgaaaaccattgtgttgaatattcatcattgctgattgaatataattatactgtggtaaatctggtaatatctttatttctaattctgtatttaattctaaatgcttagcgatgttttcaaatgttgctaaatactcgcccattaattgttcatttattgtaagtctatcttcattagccatggctctatttaacataaagctaatttcttctaatgcgaataagctaggataataattttgaatcaatgtcttatcactaaataattcaccattagctgcattataaacttgcgtcatgttatttaatttcacagataggttcatggccgtgtttttctgatacacattatctttatattggttttcagaaaacaaataatggaagagcgttgcttctttacgaacaacttcagccattacattaggaagcaatacggatgcggtacgttgtccaaggacaaataaacctatgattgcaatcacaatacctattgcaacgtcaataactcttggaaacgcaatgttaattgttaaattctgtgatgctaatccattcattaaaataacttgtattgtaataaaaactactgcaatcgcataatttgctcccaccaatgcttcagtaaacaatgctgcaatgcccattaaaattactgcaacaggtgttggtattgaaaacaacaatatgactgaaagtactaacacacctaaaatagtacctaaacctcgtgccatacctctctcgattgcatgtatagttgatgttcctagtaatattgtatgtgcagataacggtatccagtatgctttttcaaaatcaaacattaacgcaataaatatcgctatcatcataatcgctgtatatctcaatgtatttctaaaaacaatagagtctaatgttaaattttgataaatgcgtttactatataaaggttttcgcatgtctgcttcatacgcaatacgcgcttcatttgcatgcaccatttcatcaattttcaatatatggttgaataaattttgaaattcctctgttactgtcacttcttttcgccaatatcttacattttcatcactattatctagttgtgcaatgatatgatccatcatttcaattaactcatctggcaatggtcgaatttgtttagcgttcaactctaacagttcagaataaatcccttgggcagatgtgtgtaataataataatttttggaaacgtctacttaatttatcgttacttgaagtagaagtgattaataatttatcagatgctttaaaactatccaccgctgtttttgctacttgtaaaaaagcagctttatcattataagtgtgtaacaacttagatatgagtttaaaatcattttgaattgcttgttcttcagctttgtttttagaaaatacgatcgtgattaacaccatcatagtggcaagtataccgcctactaaaatcgcaaagcctctatataatgcttcttcgggagctataggtaagttaatgggtagactgaatgtcacaatgaagaatgtcgatgacggtccagctatttttaaggcagtaaatatataaaatggtataaccgtaacaattaataatgtcattccaaaaacgagtggcgttttggctgttagcgtaccaagcatcatacatattgcaaacgctaaattacaaattattacagttcgcagcttagatcgcgacggacctttaaaaacataaatatgggctagtgttccggttgcaactaataatccaaattggaaattaccacataagtaaccgattattgcaggaataatcattaacagtccctgtcttacacctttataaaagtctaagttaagtcgattgatttttataagtgatgtcaaaaagatgtcatttcgacttctcctttccttgtcaaaatatttccataatctttttattagcatagttaaaatgaatttgttgctataaattttaattacgcaacatatgtgattataacaccttatgctcaattatctaaatttaaaaacttttaaagtccaattaaaattaatttctaatgttatttaacatcgttgaacctttggtcgcccacctttgggctagttaaaatttatatgtacttttacaagcgttacctgactaatgttttaaaactttatttctttacatatatcattttaataacttcccgttcatcttaaaccatatctgttttaaaaagtttcaatttcaacgtaaaaaagcaataagccccaacaatgtgaaagcttactgcttgtttaaattatttttctattgctttatcatcactaacaattaaaggttgatctggtttcacatagaaccacataatcacagcgattactgctggaacgattaacaattggaatgtcattgtccaacctaaatgttctacgaatagacctgctaatagcggactgattaatgcacctatattaccccataagttcatccaccctgatactgtaccagagaagttacgtcctaagtcagttgctgcagcccaactcatacccattgaaataccgataccaccaagacctagtgataaccagaaaatacttacatataaatttcctgtacgtacagcaaagataattgaaactgcaaacacaataaatcctgcgattgcaattacacctctagctacgaattttgaacgacctaatcctaatacacggtcagaaattgcacctgctgataagattaagaagaacattaataaccaaggtaatgaactaatgctcatttctttaaagttaacgtggaatacttctgttaaatacgtcggtaaccaaattaagaataatgtaatgataaattgtacaacaaagtattgaattgcaattgcatagaagctaaaacgtttaaagaaattattccatggtggtgatgacttttcagtagctacgatatcacgattttccataatgaaacgtttctccgcttcattaaccattctatgttgctcaggtaagtctttggcaataatcgcccataatacagccattaaaatacctactgcaccaaaaatgtaaaatactgcttgccagttaaatgcgttaacaatagcaattgtaactattggtgctaatacaggtccgaaatatgatcctgctaataatgcacttgatgctctacctttttcatttttagagaaccaaaatgagttaaacacagcattagaaggatacattggcgcctcacccacaccaaataagaatctcactaaataaattaaaccgtggttcttaatcatacccgttaagattgtaaatgcactccaccaaactaatgcaattgtaatcatcttacgtggaccgaatttttcagccaacatccccgatggtacttgcattaatgcataacctagagagaagaatgatgccaataaaccaaattgtggtttggtcatccctaaatcatccatcatttgtttagcgatatatgaaatgtttgctctatccatatacgcaataaccccaataaagaagaacgcaagcgcgaacatccaccttacgttagttcgtttttccttcataactattcctacttccctaattaattttttaaaacttaccctgaaacgttaaaattttcggacatctggcatgtccacccctactttgtcacaaaattgtaccaaagttattttttataatattatcagacatggaaagcgtttacaatagaatctataaaaattttattaaattccgcttaacttttgctattaaaacgatataaaggaacttttagttacatagtagcctatcatttgttaattaaaaatactgcaatcctagtgttttaaaacgtatattgcaggctttcttacatattcgacattcattttaaattgcataaaactacattgctcattcattgtgcagcgcctgttatttagatgatcatttgttgacttttcgtacttatagcaagcaattttttgatttattgcttataatacattttaagacaaatgcttgtttcaacatcgcatacgacatcattcattattcatttgaatttatccagtttctatttgtctgcaattgctgaaaattaaaggagcttatttttaataatggaacaaattatcactgaatttattagtcgttttgggtatgcagccatttttatattaattttattagaaaatgttttacctatcgtaccatcggaaattattctgacatttgctggccttatgtctgttaaatcacatttatcaattttaaccttatttattattgcaaccatcgcatcgtttatagggctgttaattttatattatatctgccgtttgatttcagaagaacgtctatatcgttttattgatcgacacggtaagtggattaaattgaaaagtaaggatttaaagcgagcaaatgattggtttaaaaagtatggcgtatgggctgtatttatctgtcgtttcatacctgtattacgtgtattgattaccattccagccggtgtaaaccgcatgaatgttgtgacatttaccgttatttcattaataggtacaacaatttggaatttcggtttaattttactaggacgcacgttgagcgatagctttggtatgttgatgactggtcttcatacatattcacgtattatgtatgttgtcatcattatcgcagtcatttactttgctatacgttacattggcaaacgtaagagagtaaaataatattgttgttagtataaaggcatgaattttaaatttctatacacaaaaagcagtaaaatcattccatctattgaaatgattcactgcttttttaagtttatttggcatactttagctgaaagtcacctaaaatcctttacgttaagagatataatgaagtttcccatcaaagttcagttccctcagtatgtatacattccgcaaacttatctcacaaatccatctataatacaaactatcatcttaaataaacagaatttaccctgtcctccacacaaattgttttcgacactttaatgtgcctactatccaaaaaagttactcataacaaattgcgcattttaataaatgtagcaataccatttgcacgctacaaaaatactcgtgttcatatttatattttatattattaaagttttttaaatccatatttttataacacttgctatgtgataaaattaattttatatataaaatcttaagattcagattatttaatagcaaaggagatagtgatatgggtgttttaacaatagaacatttaacaaagaagataggcaacaaaacgattctcgaagatgtatcatttaagctgaaacgcggacaaatagttggtctcgttggagcgaatggtgcaggtaaaacaactttaatgaaagttatattaggttactctagtttccaaagcggaaattttaatgttattaacagcaaagacagcaaaagcaatatcggtgcattgattgaaaatccaggaatatatccttttatgtctggatatgaaaacttgaagttattgaatgaatcaaaaaacactcaagatatcgataaaattgtctcacaacttcatatggatgaatacattcataaaaaagctaaaacgtattctcttggtatgaaacaaaaattaggaattgctatagcatttttaaatgaacctcaattcattatcttagatgaaccaatgaacggcttagatccaaaagctgtgcgagatgtacgtgaattgattgtccaaaagtcgcaagaaggtgttactttcttaatttcgagtcatattttaagtgagttagttaaaatcacaaactctatccttattattaacaaaggtaaaattgttacagaaacatcggaagaagaacttaaacaatttaaagataatgatttagaaaatgtattactagaaatcatagaaagggaggaccaagcataaaatgggaactttaattaaacaagaatgtttcaaattatttaaaaagaaatcaacttttatcgcacctattgtcttcattctactaatggttgctcaaggttatatcgctacaaaatacaatgaaatttttacgccacaggaatctttcacatctgcttataatggtttttcatggtttgcatttttattaattattcaagcaagtacaatcatttcaatggaatttcattacggtacgattaaaaatttactctatcgtgaatattcaagaacaactatgattgttagcaaaatcatcacattatttattatttctttaatttattttgttattacaattattgcttcaattgttattgggtctttattctttaatgatttaaatatatttgaaagtagcggtaatcaattatctttattgaatcaattattattagttagtttaggtacatttgttggcgtttggttagttttaagcttaacgttgctattatcatctgcaactaattcaacgggtgtagccattgctgtaggtattgttttttattttgcaagttctattttagcagttattcaaacggcacttttagaaaaaatagactggctaaagtggaatcctattaatatgatgaatattatgcttcaaacagttgaaaaaggctttagtaagtcgacgaaattagaacttcatgaattgtttattggtaatattgcttatatttctattttcttaatacttgtagtatttattttcaagaagaaaaatatttagtaacttaaagtattagatgaataaatacacacatattccatcgtaattcaaaatcattttcaaatcccttcacccaaataatggtgcggggatttttttatccaaattttggcaattccacattttacatatcgtaattttttaggaaactagtgaatataacaaattcctcctctcatttttaaaataaatatatcactttcccacttttacttaactaaactgcaacgactcctaataccaaaatcctgccctctatttttatcaatccaagcatacttattgaaaaatgttaacgttttcttgataatcattgtaagcgcatttattttataaactaacgtttgaaatatactacaggagtgacacgtaatgactcaaattactgaaaaagaattaaaaaagaagtatttagatttactatcccaaaattttgatactccagaaaaacttgcaactgaaattatcaatttagaatcaattttagaattacctaaaggtacggaacatttcgtcagcgatttacatggtgaatacgaagctttccaacacgtattacgcaacggttctgggaatgtgcgagcgaaaatcaatgatattttcaaagagagactttcaactaaggagcttaatgatttaactgctcttgtctactatccagaagacaaattaaaattgattaaaagtgatttccaaagttgcggtcaacttaatgtctggtatatcacaacaatcgaacatttaattgagttgattaaatattgttcttcaaaatatacgcgttcaaaactgcgtaaagcattgccaaaacaatacgtttatattattgaggaactactgtataaaagtaatgaatatcaaaataaaaaatcatattacgaaacacttgttaaccaagtaattgaacttaaacaggcagatgatttaattattggactcgcttattccgtacaacgcttagtcgtcgatcatttacacgttgtcggtgatatttatgatcgtggaccacaaccagataaaattatggatacactgattaattatcattccctagatattcaatggggtaatcatgatgtgctttgggttggagcctatgctgggtcaaaagtatgcttagcaaacttacttcgaatttgtgcacgctatgataatttagatattatcgaagacgcttatggcattaatttaagaccactgcttactttagctgaaaaatactatgacgcagataatcctgcttttaagcctaaaaaaagacctgacaaacacgaacgtttaactcaacgtgaagaaagtcaaattactaaaattcatcaagctattgcgatgattcaattcaagttagaaataccaattattaaacgtcgtccaaatttcgaaatggaagaacgtcttgtgcttgaaaaggttaattatgatacaaatgaaattacagtttatggtaatacatacccgttgaaagacacatgtttccaaactatcaatcgtaataatccagcagaattactacctgaagaagaagaagtcatgaataaactattattgtcattccaacaatctgaaaaattacgtcgtcatatgtctttcttgatgcgtaaaggttcgctttacttaccatataatggtaatttactcattcatggttgtattccagttgatgaaaatggtgagatggaatcatttgaaattgatggtcatacttacagcggccaagaattattagatgtgtttgagtatcatgtccgtaaatcatttgatgaaaaagaaaatactgatgacttatcgacggatttagtttggtatttatggactgggaaatattcgtcattatttggtaaacgcgcgatgactacgtttgagcgatattttattgcagataaagcttctcataaagaagaaaaaaatccatactatcatttacgtgaagatgtgaatatggttcgtaaaatgctcagtgatttcggattaaatccagatgaaggacgcattattaatggtcacacaccagtgaaagaaatcaatggcgaagatcctatcaaggctgatggaaagatgcttgtcattgatggtggtttttcaaaagcttatcagtcaacaactggcattgcaggctatacattgttgtataattcattcggaatgcaactcgttgcacaccaacaatttaacgctaaagaaaaaatactttccgaaggtatcgatgaactttctataaagcgcgttgtagacaaagaattacaacgtaagaagattcgtgataccaatattggtaaagagcttcaagctcaaatagatattttgaaaatgttaatgcatgatcgttacttagactaaagacgacattttatgcatgtattgtatactgttgtattgatgcggtttacgcattggctacgcaaacgcgatgataaataggcgacctagctacaccgaaaaaaatcccctcactattgcgagtagtgaggggattggtgtatctatgctaattcctgttaactgtattataacaactttacagcaaaaaaatgcaaaatcaactaataaattaatgaaatgaccgacgccctcgcttctacttcaatttaacaaaatactatattagtactatatttttcattaacatgtatgttacattttctatattacttaaaattacgaagggacatttttaaatcatgcgtatcttaaaagagtccattattgtggcatttgcctttgttggtgttgtcgttggtgccggctttgctactggtcaagaaattttccagtttttcacaagtcatggcgcatatagcatttcaggcattattgtaacaggactattgattactttaggtggaatggttgtcatgcatacaggtcatcatctaaagtccagaaatcattctgattcaattaactatttcttatacccctctattgcaagaggttttgatattattttaacaatgtttatgttgtctttagctattattatgactgcaggtggtgcgtcaaccattcatcaaagtttcaacttaccgtattggctgagcgcactcatattagtcgcctttattttagcaacactgtttctaaaattcgatcgtttaattgctgtgcttggtggagttactccatttttaattgcaattgtcattatgattgcggtctactatttcacaacgagtcatcttgattttactgccgctaataatgatgctcagattcataagcagaaatcattatcacctggatggtggtttgatgcgattaactatgcaagcttgcaaattgctgctgccttcagcttcttatcagtgatgggtagcaaagttaaatatcgtgactcaacgttatacgggggcttgattggcggtttaatcattacatttttactcatgatgattaacctaggtttaatttctcaattcgataaaattaaacacgtcgatttacctacattaaaattagcgacacaaatgtctccgtcaattggtattattatgtctgtcattatgatacttgtcatctacaatactgttgttggattaatgtatgcatttgcgtcacgtttcagcgttccattcagcagacgttacttcatcattattattacaatggctgtcatcacttatattagtacatttatcggtttcatttcattaattggaaaagtattccctattatgggattgttcggtttcatcttactcatacctgtactctataaaggtttaattaagcgtattaccggcaaatctcatatcgattaaaacatctatactattgtaaaatttattacagcacttcaaaatcaaaaaagcgggcagatgaaaagtaaaaatcttttccatctgtccgcttcttaatagaactgttatttcccaagtatttgttgaccagccgttaatccagtttctgtaatttcatgaccattcacccaaacttcttcgactactgccccacgtgtcttaaacaagttaatgacttgttcacttgcagctaatggcacaattggatcatgtttccccatagaaagcaacacacttacatctgataaatcctttgttgacgttacttcaactgggtataacggtgcatataacaatgcttttttaaatggtgcttccgaacgcaacattaagttaatcgctatatttgatccatttgaaaatccaacaagtactgctttttcaatatcaaattcataacgttcagcagcttctttaatgaacgctaacaattcttgtccacgaaattccaaatcttcttcatcataaacaccttcaccaagacgtttgaaataccggttcatcccattttctgaaacttgtcctctaatacttaacaagtgataattttcattcaatgcttcgcctaatggcaataaatcgaattcatcgccacctgtaccatgcaacaatattagcgttggtgcacctttttgtccttcacgaaaaatatgttccatcacaaatcctcctcattccaattaatcatgttaacgcttagtattaaatggtcttatttctgattctatatactctcttttattttctaaaaatggtggcaatgataaaccttcacctaatgtttcatacggttcatcttccataaatcctggtccatctgttgaaatttctattaaaatatgccccacacgtgcatataatgcttcaaaatagaaacgattaacgatgcctgagttgttaatacctacctctttatatttcgttgcccacgcttctattgcatcatgatctttcacacgaaatgacacatgatgtacctcaccataaccttgacgtgctgctggccctttatcatcttttattaagattacctggccaccattgccgccttcgccaacttcaagtaatgcgacattatcttcatgcgcaatagttgtcataccgtaaacagtctctaaaatatttttaaagtcgtcaaaataacttactttaatttcaatgggtcctaatccataaatcgctttatctactggaaccggtccattcttccaaggtacaccaggtgctaccccatcatttaactcatctgaaattaattgatacacttggccatcgacttcttcaaatggcaacacttttttaccaaataattcttgaataccttcgtgtttaacaccaaattcatcaaagcgctgttcataatacattaatgcgtcatcgttaggcactctaaaagacggtcttgtaatggaatttgttcctgcctgcccttttgtaatatttggaaaatcaaagaatgtcatatctgtacctgctgaacctacatcatctgcaaaaaatgtatgatacgtataaatatcatcttgattgactgtctttttaactaaacgcatgcctaatacttctgtaaaaaatttataattacgttctgcatcatctgtcattgctgtgacatggtgaatacctagtaattcatgattatttatcattttatataccctctttatatttttagtgtatttatctcgaaatcgagatattttaatgtaaatttttagtgcacgccttacacttctgtagattgtgcacttagtttcttaaacgcttgttgtaagattgttaattcatcctttgttaacacatcaaacgcttttgttaatgtctcagcatgcttagggaaaatatctgccatttgactttgacctttttcagttaaacaagccatatatacacgtttatcatctttatccttttcacgtgtaatccaacctttgtcctctaattgacttacaacatatgaaatgctgctacttgcaattaatacgcggtctctaatacgttgaattggttgcggacctttattataaagcaactcgagcactgcaaattcagtaatatttaagccatatcgctttacgtcttcttttgtaatttgctctaatgtgtctaacgccctattcattccgacaaagacattgagcgattgtttcgttcgatccatatcatcaccaactttttaatttatttcgatttcgagataaattatatagctgaatggatttaatgtcaagatacgtgttttcatctttatttcaaattgcgcttaataaaaacgactacataaatgcggcaatgtcgtcacatgactgtcatgcaccttttacttcgtttaagttaaaatagaatagggaaatattataatcaaacatgataggagttgatatgtatgagtaaccttgaaatcaaacaaggcgagaacaaattctatattggtgatgatgaaaataatgctttagctgaaatcacataccgttttgtggataataatgaaattaacattgatcatacaggcgtatctgatgaacttggtggtcaaggtgttggcaaaaaactagttaaagcagttgttgaacacgctcgagaaaatcatttaaaaattattgcctcatgttcatttgccaaacatatgttagaaaaagaagattcatatcaagatgtatatcttggttaaataaattttgcgatggtgcaactgtaccatcgcttttttgttcgcatcaatataaaattgcaaaacgactagttattttgcatttcaaactttatgctatcaattcattttcttttctggtatactttttatactaacttatagaaaaatagaaaacgaggcgatgcataatggcatttcacgataaaacagcaacacaagtgacaaacattgaactgaacgtaagagacttagacttaatgacaacattttacaaaaacattttaggactatccgttaaaagttctgacgataacacaaccgtattatctgttgggactggtggccatactctaacgttacatttattagaagacggccgtcagacttccccacgtgaagcaggactttttcatatagcatttttattaccaactactgaggatctagctaacttcttatatttcgtggcacaaaaaaatatgggcattggcgctggtgatcatttagtaagtgaagctttatatttcaacgaccccgaaggtaatggtattgaagtctatcgcgatagaccttcatcttcatgggaatggcaaaatggcaaagttaaaatggatactttagaagttgatagccaaaccttattaacacatcgtactgatgaaggttggcaaggaatgccagcaaaaggcatgattggacacttacatttaaaaacacatgatttagacgcagcatatcaatgttacattgaacaattaggattccaacatgtgtctgattttccacgtgcgctatttatgtcaacgaatcattatcaccatcatattgctgctaatacttggcaatccaatcaagcaagacaaaacaatgcacaaagttatggattaacacatgttgatatttatcaacccgacgcctcaacacatacatttacggcaccagaagggtttgacatcacagttcattcaaatactgaccttgttccagaaaaataatcatccatactttattaatacaattttttcacgcaaaaacctgcgattcatttatgtaatcgcaggctttttttattgctaactttttaattttatatatttagacatactgtattctatttattcttttggtccaacccattcaataacatcttcatatgcttggcgtgttttatttttcggtggatcttgttgtctgtagccaaatgcaaccatcactgataaaccaaattgctcagtatctaagatacctttatttgctaaaatgtctgtcactgtatccagactaaaaccttccatcggacatgaatcaatacctaacaatgcggctgtcgtcatcatattgcctaatgcgatatacgtttgtttacttgaccagtcatacaaggcttgatcattatcagaaatatggaaatctgcttggaatgcatcgaatttttgttcaacagctgggatcgtttgtgcctcatattttttaatatctcttaacatatgttgtacatacggtgatcttgacgttacatttttacgcgcaaaaattagcacaaaatggctcgctgtatctaattgttttgctgcgccccaactgtgcgcttttaattcatcacgtaacgcttgatcttgaatcacgacaaacttccaaggttctaacccaagagaacttggagacaatctacctgactctaatattgtttcaaaatcttctttcgaaactttcttttgtggatcgaattgcttagtcgcatgtctgaaatgaaatgcatccataattgtttgattcatattgctcattgaacatagcctccaatttttatatttattactatacaaattatacttcatgttttaaaaagactaaagtaatccgtttgcaattcgctataacttgtgcacatgttataagttttctgcaataaaacacacttttgaattttggaaaatttagtgttataatatatttgtgatatttttcacaattaaattgtggcgtgattttaatgtacataatctttaatttcactcatttacttttcaatcttttaaaagcgaggtttttaataatgacaaaaattatgttctttggtacgcgtgattatgagaaagagatggcattaaattgggggaaaaagaataatgtcgaagtaactacttctaaagagctattatcaagtgctacagtcgatcaattaaaagattacgatggcgtaactacaatgcaatttggtaagttagaaaatgacgtttatcctaaattagaatcttacggtattaaacaaattgcacaacgtactgctggatttgatatgtatgatttagatttagctaaaaaacacaacattgtgatatctaacgttcctagttattcacctgaaacaattgcagagtattctgtttctatcgccctacaattagtgcgtcgcttcccagatattgaacgccgtgtacaaacacatgattttacttggcaagcagaaatcatgtctaaaccagttaaaaatatgactgttgcaattatcggtacgggtcgtatcggtgctgctacagctaaaatatatgcaggatttggtgctacaattacagcttatgacgcttatcctaataaagatttagactttttaacttataaagatagtgttaaagaagctattaaagatgccgatattatttctttacatgttccagcgaacaaagaaagctatcatttattcgataaagcaatgtttgatcatgtgaaaaaaggtgcaatcttagttaacgcagcacgtggtgcagtcatcaatacacctgatttaatcgctgcagtgaacgatggtactttgttaggtgctgcgattgatacttatgaaaatgaagctgcatacttcacaaatgactggactaataaagacattgacgataaaacattattagagttaatcgaacatgaaagaattttagtaacaccacatattgctttcttctctgatgaagcagtacaaaaccttgttgaaggtggtttaaacgcagcattatctgtcattaacactggtacatgtgaaacacgtttaaattaatatatatttaaaagcaaaggcgcaccatgtgcctttgctttttattttgtttatctgtatcaaaatcggtttgattaaaatctgctttattttatcatctattcaactgattgtagtgcgcttattttactatggcattattgcctaacctgtttgagatatattaatgtttgatgattcgtattcaaagttttcatttaacatgtatttagtatcatgatagccgcttcattgatgatgtgctacctacttgttcaatacttcttgttcgataatcgttaaaacaccctgcttatcattacttggagcgacagccgaggcaatattgaacaattcttcatcatgactattttccatcacataactatgcttagcgaacgctagcatatctttatcattattcgcatctccaaaggccatgagctctgaaggagacatttcccatttatctaacaatcgttttaatgcctgccctttagtcatgtttggcataataatatcaatgctatcgtgcccacttgagacaagtttaatatcattgctgaattgcgttgctacttcttcgtcaacatttggatgcgtctcacgattaatattaaatgctattttgacataatcatcctcaggtaattgttgtagactgtcaatttcttttaactgatgataataaaatctcgtatcttctttaaatgcttcagaagtatgttttaaaatatacgcgcttttcaaaccacagatgacgagttgatcaatactttggttcatatttaagtaatcgacgacctgttgaaacacctgacgattaaagcttttataattatataactcattgcctttataaataactgcaccattttcagaaataaaatacatatctctatccccgaaaatagacttcaacttcgcatattgattgccactcgcagcaataaatgtaatatctctatttctaagttcagtaaaaatcgcttcaaatctcggtttatcgtatgtctttttcgaatctaaaaacgtcccgtccatatctaccgcaatagccttaaccatgattatcctcctcattgctcttttagtcgtcttcattatatccatctcatgacaagcaatgaagtttgtcataccacaatgaaactatattcacattttgaaattgctttcatatatgcaaaacacattacactggatatagcattcggaggcgaacataaatttcagaatattgtaaaaatataacgatatatttatcatttggacaaaatatagtgtgatatactaatttataacatctatacataatgtgaaaaaatttttaaaatacaattaaatatcggtgtaataaatccctttatacataggagttgtatacatgaaactaaataactattctttaaaagttaaaaacaaacaactagttgacaattgtgatttaaatttctatcttggtcagatcaatcacattgttggtaaaaatggtgtaggaaaatctttattagctaaagatttcttactaaataatagtggaaatatccctaagtccatttctcaaaatgtaaccttaatatcaagttcatcaaatattcctaatgatataacaaaagattttttattatcattgttaaaatcaaaatttgaaaacaatcgacaaacattcgataagatttataacatactaaacatcgaagcaataccgtctaacgtactactaaaaaacttgagtgatggtcaaaaacaaaagcttaaattattaagtttcttattggaagatcatgatttaatcatattagatgaagttacaaacgctttagacaagaaaacagttaatgaaatttatgaatttttaaatgattttattcaaagccatcaaactaaaactattatcaatattacacataatttatccgatttaagtgctttgccgggtaaatactttatttttaaagaccttcaaatagaagagtaccaatcaaaagaagaagtcataaatgattacattaatttataattgaggtgtccactttgaaattagaatttaaaaaaagtatttccaataaaattatttacacgcttggtgtgctattcatattccttttcttacttgggtattttttaccaataggaatagacaaagttaaaaatttaagctatggtcagtttttctttagttcttatacagttgccactgaatttggctttttattattttcatttgttattgcatattttattaataaagagtattcgaataaaaatatattattttacaagctgattggcgataatatatttaccttcttctataaaaaagtagcagttctattcattgaatgtttaatttatattattttaggcatcacaattatttcaataatatattcggatttctcacattacttactattaataatcttattttcactcgttatcttacaatatatcttagttgttggaacgattagtatggtttcacctaacattttaatcagcttaggtatcagcattgtatattggattggttcagtcatcttagttgccattaataaaaatatatttggtatcgttgctccgtttgaggcgagcaacacgatgtatcgtgccgtagaaaaaatattgaataacgagtcaacatttatatgtcctactgaaattataaatacagtatcattcttcgttcttctatttatagttaatactattgtcttattactaagtagaaagagatggttgaaaatcggtatgtagtacataaaaaagagcggcatccattgtcgctcctttttattatgtatttttacaatctccaccaatgacacgtcgtcattggtgcctcacaccaaacaaaaaaacagtctcgcaatcaagactgttttccactcaatatattcatccattagcgtaatggattatttgacttctgtagctacaaagattttacgtttttcccaaacgcctgtcttttcattgtaatcatcacaagtaattaatgttaattgtttatctttacctttttgttcatctagaacttctacatctgttggcttaacatctcttatacttgtcattttatacttacgtgtttcattaccaactttaaagtacaccatactaccttttttggctgctttaagatttgtaaattgatagttcggacggtcaatgaaagtgtgtcctgcaattgaaatattttgatcatctagtgattcattttcttctgcaaagcttacacctctatttaattgttcaggtgttgctggtcctggatatactggttctttaatatcagcatctggaatttcaatatagcctgccacttttgatttatctttcggaatttgaggtttagcttgctgcttattgtctttactcgcctgttcttttacatttttatcatattgttcaatcttttcatctttatctttatcgtgaagataattatcgatatgtggtttagcaaacaaatatgctgccactaggataagtactacaccagcgattgtcattaatcgatttgtccattttttcatacgttaaggctccttttatacatttcacaatgcctattaacatttcatatagtataccattaattataaaatgactcatagcaattcattttatattataaaatttgcacatatattgtcacgttagatttcattacacatatttgcattcaaataacgaaacgtttttaataattactaagggggaattattatgattcgatgtgctaaaaaagaagatttaaacgctatattagcgatatacaacgatgccattattaatacaacagctgtttatacttataaaccgcaaaccatagacgaacgtatcgcatggtttgaaacgaaacaacgtaatcatgagcctatctttgtatttgaggaaaatggaagtgtattagggtttgcgacgttcggttcgtttagaccttggccagcatatcaatatactatcgagcattctatttatgtcgatgcttcagctagaggaaaaggtatcgctagtcaattattacagcgtttaattgtagaggcaaaagctaaaggttatcgtacacttgttgctggtattgatgcttctaatgaagcgagtattaaattacatcaaaaattcaatttcaagcatgccggcacactgaccaatgtaggctataaatttgattactggttagatttagctttttatgaattagatttaaaagactagtagtgtttaaatcacataatataaacaagacaaccatgttaattcacttaacataacatgctaacatataaaactataaacctcttagggacaatttacatcgtcccttttttcatttcaaatactatccccatagctttgatttaacgctttttctcaataacaaaacgaatatagtagaacatgaaaacgataatcatgctgagcgataaagatttaaataatagattgacccacgttccctcagtcgtatatccatatgtaatcgttgtgttaatgatgaatgctataaagatgattgatagtcttagcatatcatcactccttttaagttattttagatatacgggggcgcttttgcaatcactattttgattagcatgtatttcccataaatttttcaactttatgaaagataattaagaagcatctatctggtactaatgatccagacagatgcttcttttttatcaatatcttattgttatctcattaattatttttaaccatatcttcagctgtgccaaagattttacgtttaattgcttcgccagttggtgtgcctgctagtccacccaatccagtttcacgtaatgatgcaggaaggttacgaccaaccttatccattgcttcaataacttcatcaacaggtattctactttcaatacctgctaatgctaaatctgctgaaattaaagcgttacccgaaccaattgcatttctcataacacaaggaatttcaacaagtccggctactgggtcacaaactaaacctaataaattacttatcgctaatgccatagcgtgcccggatgcttctggtgatcctccgaatatagctactgctgcagctgcggccattgcagatgctgaaccaacttcagcttggcagccacctgttgcaccagctacacttgcattgtttgctacgacacgcccaaacaatgctgaagtgaataagaaatcaatcatttgctcttctgttaaatcatgtgttttttctaatttaaaaagtgcaccgggaatggtacccgaggaaccagctgttggcgttgcacaaataatacccatcgcagcattgacttcatttgttgcaatggcacctttgactgcatcaatcatttcatatccagacaaagcatgatgtgtttcattataatcacgtagtttagcagcgtcatgaccagtgtagcccgttacactttcaacgccatcacctgtcgtccctttgattactgcgtctcgcatgacatctaaattttgtttcatttgcgctcgcacttcatcacgtgatttaccgcttaattccatttcttctttaaccatgatatccgcaaatgacatattattttctacggcataatctatagtctctctaattgaatcaaacatgtttattccccctctaatttatataggaaacgtttacgtcactgtatttctctttaattgtatttaatgtcgattctgagattgctttatttaatggtattacaaccaagcatttatcttcatctatcttaataaattcatctttacagtctaatttcatatcgttgatatcattaatgaaatgatttacttgtgctttagtcatatttccgtcaacaactaaaattggtaatccatgatttaaatctacttctagtccatttatatgaatacctttaattttaattgtaccaccaccgattgaaataccgataatttcaatatagcgaccatcattacgagatgatttaatataagcacagtttggatgttgaccaatactatcgccttcttcttcgatgatatctattttaataccatcatcagctgcaatttctaatgaagatttaattcggttatcaaatgttgaatatcccattgctccacccacaatagcgacatctgtaccatgtccttggtgtgtttgagcaaatgattcataataatgtatttcaatatttttaggaatatctcccaatattgcgcgtgctgaattcccaatctttactgcaccagccgtatgagaacttgaagggcccatcataactggtccgataatatcgaaagcactttgataatcatagctctttgccataattaaacactctccttaatatgattctttttgctcggcattttaaagttgatattcattaaattaaacttattaattagtgttccaataatataggctaagacaatgctgacaataatcactgttgcgattgttacaattgatgtcactgcattattaaagccaaacaatacgatggcacctgcaattggtgttgccatacctttgacacctattactagtccgctaaatgtcacgatacatgcgttgacgaccccaatcagtgcatttgtaccatatagttgtactggatattgcgctattaaatcaatttgcgtcaatggctcaatacaaactgcaaatgcttttgacggtccaccaatgtttaattttcggaataaaataaggttaacaaatgagctacctgtacatgttagtgctccaatagccataggaacacctgtcagtcctaataaacttgttaataccattgaacttagcggtgtcatacctgtaacaggaatcactagtcctaaaatgaccgctaatgcatatggattgttatcacctaccgcagtgacagcactacctatttgttttaatgttgctagcacaccaggtgtaatgattgatgcaagtccgaaagcaattgctggtgcaaataagatcaccacaattaagtccaagccttctggaactttcttttcaatccatttaattaaaaaagctacgcaataagctgcgatgaatgctggtaataatttaaagtcatgtaatactaaaccaacaataaccgcaaatactggtgcaacacctaagtttaagcacgttagaatacctactgcgataccgcttaaacttcctgctaaatccccaatatcttgtagaaatttaatatcaaatacgccaccaatagcgtaacttaagaatgcttgtggtagaaatgtcgcacaagctgcaccggataatgcttgtagtccttgtttaccgtacggtgcatactttaaaaatagcgtcatgatcactaaaaccaagactaatgtgcctacacctaacagaatatccatttcccaaaaacctctctctatgtttattttattttcagaccataaacatcgtacacccttaagaaaacgttttcaacttttatctgttatcaaatcaaatatttaagtgaaatatttcatatttgtgaaagatttttaaaatggattgtttcaaaaactacttatgttgtcattaatatttactaattaactttttactctatatttcaaacagttgtgtgacagttttttgataacttttttacatctgaaagtgagtaatatttctaaaaatctttaatatttatacactttatctttcgagctatttattttttgtttttgtgctgtgtttataaaaccgcacactatattcaaaaataacttattacacatatatttgcaataagataattaaagtaggatattatttttagttttctgataggaatgatgatagtctataggttgaatctttactttttttaaagctaaatttacatcaacttaacaatggctggttatactgaagatgaaaatatttagtataacttagtggaggcgataaaggtgcaattgagtcattccgttaaagttgcaatttctatctatttagcacttatctttataacgttcacttcttatttagtcattattttatatacgagtatgactggacatgatgtatcacatttcgtgttagatagtcagcattctcatcatggatctcttacgcaaaaacatttgagtcttcctgaaatctcatttaaatagtttatcctctgtgtttcaacattcatttcccatatcgattcatttatctatcatctagaccactacatcttagatgatttttttattttctcatttcactctttcttaaaagtcgatataatgaattaaatcattatcatacaccgacatattttatgttgttggtgttaagttttaaaggggtgagatacttggcgaataatcattcagctttgcgtttaaaaggaattatacttgccattgtcggtgcttgtttatggggattaggtggtactgtttctgatttcttgttcaaatataagaatattaatgtcgattggtacgtcactgctcgacttgtagtcagtggtgttttcttacttattatgtacaaaatgatgcaacccaaacgttcaatatttagcgtattccaagatcgacgtatgttaggcaaattacttatcttcagtatactgggcatgttagttgtacaatatgcttatatggcatctattaatacaggtaatgctgcgattgcaacattactacaatacattgcgccagtttatattattatttggtttgtcataagaggcgttgcaaaactaacattatttgatgtgcttgctattatcatgacactattaggaacatttttattattaacgaatggttcattttctaatttagtcgtcaatcctgcaagtttattctggggtattttagctggtgtagcactcgctttttacacaatttatccttcagacctacttaaccgcttcggttcgattctaattgtcgggtgggcaatgcttatttctggtgttgcgatgaatttacgccatccaatttggcacattgatatcactaaatgggacatatcaattatattatttttaatctttggtattatcggtggtaccgcactcgcattttatttctttatcgacagtttacaatacatatcagcgaaagaaacaacattattcggaactgttgaacctgtcgtagccgttatcgcaagcagtctatggttacatgtggcattcaaaccatttcaaatcgtaggcatcattcttattatgattttaattttattactatcacttaaaagacaacctgaagcattagatgaataagaaaactctgataatcactttagcaagtaactatttttaacaacgtagctaccttgtatgtgatatcagagttttttattttaattaataatatttttcacttggtataaaaagcgtcggcgctctggtatcggaaatactggataaatatggaattggtaatatccaggtataaagtcatgttcgataccttttgcactcaacaattgcgataagttcaaagcatctgggtacagtacttcttttgtgccaacagttaatgtaatacgacctaaaccatctaagtcaccattaattggtgatactttgtagttatctaaaggtgtgtcccctgcccattgttcagctaagaacacactgccatccacacctaccattgggtctttctttaagtagtcaggaatttcaggatgctgcatcgttgcatctaaaactggtgaaattaatacaatatgtcctggttgcacaatatgtttttcttttaacaattgagcaaatgataaagcaatttgaccgcccgcagagtcacccattacaacgatttgtttagaatctgctacttgattcaataaatcatggtataacttttcaaaaagcacatacgtcgcttgataatcttgatgcggaatcttcggatatactggcatgatgactttagcattgagtgtttctgcaagttcatcaataaattcgaaatgaattttgagtgggtcttggaaccatgcgcctccatgtgcgtataatacaacgcgttgatgcttatcttgtttatcattaacgttataaacggttgaaccgtagtgcttatccactgttactggcatcttaaactgataattggtgccctcatattcacctgctgtctgtggcgccattttttctaatgctttcatcgcttcttctttatacataaaacgacgcttagctctagataatcgtataccttgttctaacatataacttttcacactgcgtttttctttaattctaatatgtgcgtatgctgctactaaaaatccaaacgcaagtgtagaccattttttacgcatttgtcgtcactcctctttgatgatttctactatagttctactgtaccatgctgattcttattactaccaatatttactgggaaataagttatgatgtctacataatcttagcaatgctaatcatttgcgatattcatgctcatcgacatcgttattcacactatcattcatttgcttaagatgatgttcaaaacgttgcatatcgataaaacgcccttgacgatgcatttcttttccattcataaaaattaaatccacaggtacagtgaaaatatttaattctccagcaatagcttcaacttgactttgattaatcacagctaatggcacattgggatatgattgcatcaagtcttcaatttgtggtaaaacggcatgacacacgctacactgatcgcgcatgacatgtacaactgctaacggatattgatgaataaattcacggaatgcttcgacactatttaattgcttaaccatttcgaacaccttcttactttttatattttaaaatgaagtcattattttgttgctaaaatgtcttgaaacacttgtggcacagaggttatcttcttatcactcaatctgtaaaaaccgcctgtctgtgtaccaatacaatgcacgcaatgtgcggacacaatttcaaactgaaacacccatttcatcttgcttgctttaactaagtaaatacgacctactggtttgtcatgtattgtgacaggtactttatactctgcttccgttttcataagtataggtgaaatgccttgattgatcattgttgagtaattcatgtgctgattaataaacgctgttctcaaatcttcgaaccatctaatataaacgatattactaacgacacccatcgcatcaatgtcgtaaccattcacttcgatttctttctctgcaactaatagaccttctgttgtcataatgacaaatctccttatcttacaaatagatttaaaatcatgttaatttatttttattactttcatgataaaaatacaagcaattgaactttattacggaaaatcaaacttttcaatgagactattaatttggctagtcgcgaagatgcatttttctaaaatgtgacaaaaacataagcaatgttttctatatctaacactaatatttaacttattatcatcaacacacctgctatacatcattgcgcactaaaaaggcagtagcttcattttaagctactgccttttgtaacgtattctctttcaactcgctacttcgcatacgcactacgaatgactaaaagttcattcatttgatatgctgtttcatttttaatcattatttgactgtcataattagcttacctggatcagcatcttgtacatcttcaatgacaagttctttattttcaagatttgtaataatcattggtgtaacgatgcttggtgcgtgtgctttcaagtatgctaaattcactttcattaatggttggccttgtgttactttttcatcaacgttaatcagactttcgaatccttcaccattcagtttcactgtatcgataccaatatgaataagtacttcgacgccactttcagattctaatcctatcgcatgtttcgtagggaagattgttttcactgtaccatcaaacggtgctacaatttcacctttttcagggataaagccaataccatcacccatcattttaccagcgaatacttgatcaggtacttctgataatggaatgatttgaccgacacctggtgcatagatgtctgttgttccaagtgcttctacgtgaactggttcatctgacatttcttcagtcactgtcgtttcacttggtttcgtaatttcaccactcataatcttggccatatcatgtttaatttgatctgattttggaccaaagatagcttgcatattgtttccaacttctaatacacctgatgcgcctaaagctttaatacctgctacatctacttttgatttatcaaccacttctacgcgcagacgtgtaatacatgcatctaaatgtttaatgttttcttttccacccattgcatctaagacatcaaatggtaattttgcgacactagagttacgaatttcagtttcttcatcttcacgacctggtgttttcaatttaaacttacgaattgcaaagtcgaataagaagtaatacacgatagcatatacaataccgactggaataactaataatgcgtgtgaacgatcccagtttaataaaccatataaaatataatctatgaaaccacctgagaatgtcataccaattttaacgcctaataaatgcattactaagaatgatgtaccagctaataatacgtgaattccataaagtactggtgctacaaataagaatgaaaattctaatggctcagtgataccagttaaaaatgcagttaatcctgctgataacattaaaccacccacgacttttttgcgttctggtcgtgcatttttataaatagcaaatgccgccgctggtaaaccaaacatcataaatggatatttaccagtagtaaatgcaccagcagtaaatggtacgccatctttcaattgtgccatccaaatacgttggtcaccacgaactaattcacctgcgtgatttgtataacttccgaattcaaaccagaacggtgaatagaaaatatgatgtaaaccaaatggaattaatgagcgttcaataataccgaatataaacgttgttaatgttaaatttttatttaataagaaattcgataaactatttaatccatcttgaattggtggccacgcaaagcttaaaagcacacctgttgcgattgctacgaccgatgtcacaatcggtacaaatcgtttacctgcaaagaatcctaaaaatggtggtagtgtaatattataaaatttgttgtaacaccatgcggctaaagcacccatgataataccaccaaacacacccgtttgtaacgttggaatacctaatactaaagcatgtgctggttctttcgctgcttgacttaattcttttgcccctttggcatatgagaaaatgtcatcaattgtaatgtgcaacactttccccattgttgcattcataattaagtaacctactagcgctgctaatgctgcaacaccgtctcctcctgctaatccaagtgctgtaccaactgcaaataataatggcaagttatcaaatacaacttgtcctgctgcttccatgaccgacgaaatcattacaatgatatcgttttttaaccatggtgcaatttctactaattgttcgttgtgcattgcgttaccaaacgctaataaaataccagctgctggtaaaatcgcaacaggtaacattaatgctttaccgatacgttgcaattgtccaaacaatttcttaaacatataaacatcccctatctcaatttccgcttccatgtacaaaaaaagcaggcatgaacaaacaagactattctcatagtacggttgtttgctcatgcctgcattaccagtaacacgcaagtgatatgtaattcatagctattatacatatttgtaaaagcgttttcaacaactttttcacaattttatcatcaattcagtacgatcatttgtgataaataaacaaaacggcaattcccattttgttgaaatagaaattaccgtttttatagttcaattcaattgtgataacctttcaatcagttataagaaacgttttgctgcaactgaaataggtggaatttgatctaaatctaaatatttatcttcagtaatagatctaaatgcccatttaccataaccaagcgcttcttcatttacaattttacctggtaatggcgcagcattaggatcaacatatacatctacaatcgttggtacatcttgtgctaatgcctcttcgactatagcatctacttcgctagcactcttaattgtataacctttaccacctgctgcctcagcaaattttgcatgatccatatcagaaaaatcaactgcatattctaattcaccagctgcttgttgttcatatttaataaatgctaactgtttgttattaagtacaaatacagttaaaggtaaatcatattgtactgctgtagcgaagtcttgcattaccatttggaatgcaccgtcaccagcaatggcaatcgcttgtctatttggatatgcaatttttgatgccatagctcctggaagaccgcaacccattgtacctaaccaacttgaaatgatgaacttgttgttcacaccaagatttaaataacgtgtagaccaaactgttgcagtaccaacatctgctgaaattactgcatcatctttaataaatttgttaattgatgccattaaacgttctggacgtaatggtttgctattattatttttatcttgttccatccatttatcccaaaccgctttacgttctaacgttttgtttaaaaatggtctttccgcaacatgtttaatattttcagttaactgatgcaatgcaattttactgtctccaacaattcctacattaatattaaaacgatgtccgatatttttaggatttgtgtcgatttggattgctttaatatttttcttaggtaagtaatccacatatggatagtttgtaccaaccataattaataaatccgcttcctgcattgtttgataagatgttttggtaccaattttacctaagttaccgatactatatggatgatcatccggcaagattgttttagctggtaatgaatgaatgacaggaattttagccatttcaataaattcacgtagctcatctttcgcatgttttgcacctacaccaattaacatgacaggctttttacttttattaattagtttaaccgcttttttgatgtctttatattttggtgatacaactgttggtcttgatgtatctactggtttattcgttgtatctttaattttttcagttaataagtcgttaggacaaataacaacagcgacacctttttgttcatatgccgtacgaattgcttcgttaacgatttcaaacacattgtcacctttttcaatttggtgattataaacggctacatcttcacataatttttgtaaatttgtttcttgaaatgctttcgttccaagtgctgtactattcgtttgtccagataatattaattgcggtacattatccattttggcatcgtacataccatttaataaatgaattaaaccagggccaccgatacttaatgccacaccgattttaccagttaattttgtgtaaccagcagccgctaagcttgctacttcttcatgacgtacatgataaaatttaaattgatctctcactgtacgtaaactatcgacaactgcgtcgattgagtctcctggaataccatacaagtgatctatatcccatgcttgtaatgctttaactaatgcttcatttgcttttatttttgccattattactaatagcctccctttcttagtgtctatcattttaaatatctaaattaatagaataataaaattagaacaggtattaacactgaactaataactgcagttaaaatcatcccaattgaactaaatgcaccggattcaatatccatttctagtgctttagctgtgccaaatgcatgtgacgcattcccatacgttaaacctttggcgatagaagattcaaatcttccaaatcttaataacatcgaacctaaaatactaccgattaaacccgttgtgataataaaaagtacggtcatcgtatctgtaccacctagttcatgtgacacttcgatacctactgcggctgttatagatcggggcaataacgttacaatgacgtctttagaatagccaaatgctttaagtgttaagaacactaacatgaaattcagcatgacgccagttaatacacttgcaaaaatgatagagacattgtctttaattttctctctatttttataaagtgggtacgctaaacatacgaccgttgcgtttaaaatatggttgatccaactgccacctttcatatacccgttataactaattccaaagataagtaagacaaaaataattcctaaagatgcaattaatgctggattcaaaaatgggttcggatatttttgttgtaaccttttagcgaaataatataaaacgacagtcaacaaaatcattaataaggcttgcacgtaatcattcataagcgtctacacctttacgatgtttatgtttaacagacattttttcagcaatataacctgaagataatgcaacgatacatgttcctataataatgactgcgaaaaagagtatataatttagcgtaatttcggaagcaacatccataatacctacaactgacggtatgaagaaaaagaccatcgtctttaataaaaagtttgcaccgtcttctacccaagttagcggtacaatcttaaattgtaatagtaaataaaataaaaatagaccaacaatactgccggctaagggaagatgaaaaatcttttgaatttctgtgccaatataagtaatcacaatgatgattcctagttgtagtagtagtttgattattaattggactttgtgcatggcgccatccctttctaaatatgtctaaaatgttacaataactattataaagatggcgtgcacaatataaaaatactctttttttatagtttgtattactattttctatggaaacgctctctcaatttcacttcattttcacaaaaaaacactcatcatttcaatgacccacgtaatgatgcgccttaaataatgagtgctttattaatatgttagcctaaacgatctttcaaaaattctatccatttcgttgtggcatgacttaattgtttatccttcttccaaacaacacctaattcccaatgtacatgcgcatcttcaatgcgtagcagcttcacatctccatttagttgctctgaaattgatgttggtaaaatactaatacctaattcattcgtaactaaatcttctataacatgccattgtgaaatttgcgctacagtattcggaacaaagccaacgtttttagcattttcaataattttatcattcaagtaaaagtctttattaaataaaatgaagtcttcacctgctaaatcttcgagtttaacagtttcatattttgcgagtcgatgctctctgctcacgataagtcgcaaatcttccttatctagggtagtataatcgaaaatatgatgatcgactggcaaagtggtcacgcctatatctacttcatcattgataatttgctgctcaatcgttttgccgccattttctattaaattatatgtaacatttggatattgctgatggaatgcaccaagaatattgataagaatcttcatattcatgactgccgacatgcccatgtttatatgccctgtttccagtccattcaagcgttccatttcagatggtaaataatcatacagtgcaacaatttctttacttttctcataaaaaatttgacctgcatcggtaagtattaaatgtcttttacttctatcaaataagggcgtgcccatttcattttcaatatctttaattgctttactaattgtaggttgtgcaatatataatgatttggaggcattagtcatgcctccttgcttaacgacttcaataaaatatttcatatgtttgatatccactaacatcatcctaactatttcaacacgtttatttcattatacacaacttcttaaacattcaataaatttagatttataaaattgctttataaaaagttttatgtaaaatacacattcttttatggtattatattaatggctcaagtttgttattcgaggtgaggtattgagcttttacgaatttatgcaaagttttcttggtgatgacacaccattaggtgaattggttgattggattaatcaagatagcaatttccctagagaagtgaagagccatagtgaaatattgtcatattttcgaacaaatccatgtcctgaaagcatctcagtacctgtaattaaacgggcactatcagttttcaaccaattcacaaatgtacaatgatacatgaatacatggagtcacatcatctcatgttagcgctctgattgcagggcgctatttttaatgttatcgctacatttagtatattgtgattgctattttctttcagttatagaaccacgtaccttttcttttaaatcattttatattttcccactaatatccgctgttaatcaattctgacatccttgtatcactatgacaattaattgttaaatacatgaatttctacattttatgaaaaaatccatttttattacaattcaacactttatatgacaacttcattacagttacttttattgttgattgcttgcattgttttctaaaaaaattttgttatcataattaacgttgaataaagaaaaaaattaacttgggagataaaaatggaatataaaaagatactaattcgtttattaattgcttttgcagtacttttctcagcagatttcacttatcaatccgtcgaacaaacgcatcaatcgcatgccgcagttaattattatagtaaaaaccaatgtacatggtgggcatttaaacgtcgcgcacaagtcggcaaacctgtttctaatagatggggcaatgctaaaaattggtattacaatgcacgtaaatcaaaatatgcgactggtcgtacaccaagaaaatttgctgtcatgcaatcaactgcaggatattatggacatgtcgcagttgttgaacaagtatataaaaacggtagtattaaagtttcagaatacaacttttatcgcccattaaaatacaatacacgtgtactaagcaaaaaggcagcacgtaactttaactatatttactaatcaaaaaacttctatcacgaacgcttcaatttcctgtatgcgtgtgatagaagtttttattttttgttcatattaatttatctaagcgctacgatggactgacttaaacttttctttaaaatcgctattcgccatttactattgttgtctaatttcttgtaaaatgcgttcagctacttgtgtattcgcacggggttcttgcttcaatgcttcagctacttgcgcaatttcatcaccttttgcacctacaacaatagctaaagatttatattgcaagctcatatggccttgctggataccttcggaaacgagcgcgcgacatgctgcaaagttctgtgctaaaccaacggcagcaactacatgacctaattcttgtgctgaatctacatttagcaattctaaagaagctttagcaattggtaatacttttgtaccaccgccaacgattgccaatgtcataggcacttctattgtaccaattaaacgttgacgtttttgatcgtatctccatgttgcaataccacgatactgtccgtcacgactcgcgtatgcatgcgcacttgcttctgcaccacgcgtatcatttcctgttgctaaaacaacggcatgtatgccattcataacacctttattatgtgttgcagcacgatgaatatcaacttgtgccaatacagaagcacgttccattcgtttggcaacctcttctccagttctctcgccccttgctaaatctttaacgtcaatttcgccttgaactttaacaacggacgctgttgcatgattggataaaatactcattaaaatgtcgctttgtggagattcattttttaaaaatgcagttatggcctctaaaatcgtattaagcatattagcgcccatagcatctttcgtatcaacaaatacttttaaagatagtaactgttgctcaggaaatgtatcaatagctatacgttggtaaccaccaccacgcgctttaatagaaggatatgcctcatccgcaattttatgaatttgcttttctaaagctttaatgtctgctgataatttttcagtatcgtcaacgccatcaaagacgatttgacctatcataatacgttcagaagataccgttttaaatccgccagtctgattcactagctttgcaccataactagctgcagcgacaactgaaggctcttccaccatcataggtacaacatatgccttatcgtccacaatgatattcggtaataatccaacgggtaatgcaccttgcgcgatgacattttcaattaaactatttgctacttcctcatcaattaatggatgattcaataaaatgtcgaattgatcttctgataaccattgcttatctaccaattgttgtaacttttgttgacgagataaatgtcggaaattcttatctaaactttgcatggacatactccttttacttcacataattttttaacatttcaatcactactatttttaccataaaataacgttattcgtcttaaaattcaattgaataattattgttttaactataaaataaagcaaggtaaattaaaacgcttacaagaaacgtcaaatcatttttaaatttagtgtatttctttgtataagataagcatattctgatatgatacaagtgttgcttttataaatttgaaaggatgtaaaaccttatgacaataggtatcgacaaaataaacttttacgttccaaagtactatgtagacatggctaaattagcagaagcacgccaagtagacccaaacaaatttttaattggaattggtcaaactgaaatggctgttagtcctgtaaaccaagacatcgtttcaatgggcgctaacgctgctaaggacattataacagacgaagataaaaagaaaattggtatggtaattgtggcaactgaatcagcagttgatgctgctaaagcagccgctgttcaaattcacaacttattaggtattcaaccttttgcacgttgctttgaaatgaaagaagcttgttatgctgcaacaccagcaattcaattagctaaagattatttagcaactagaccgaatgaaaaagtattagttattgctacagatacagcacgttatggattgaattcaggcggcgagccaacacaaggtgctggcgcagttgcgatggttattgcacataatccaagcattttggcattaaatgaagatgctgttgcttacactgaagacgtttatgatttctggcgtccaactggacataaatatccattagttgatggtgcattatctaaagatgcttatatccgctcattccaacaaagctggaatgaatacgcaaaacgtcaaggtaagtcgctagctgacttcgcatctctatgcttccatgttccatttacaaaaatgggtaaaaaggcattagagtcaatcattgataacgctgatgaaacaactcaagagcgtttacgttcaggatatgaagatgctgtagattataaccgttatgtcggtaatatttatactggatcattatatttaagcctaatatcattacttgaaaatcgtgatttacaagctggtgaaacaatcggtttattcagttatggctcaggttcagttggtgaattttatagtgcgacattagttgaaggctacaaagatcatttagatcaagctgcacataaagcattattaaataaccgtactgaagtatctgttgatgcatatgaaacattcttcaaacgttttgatgacgttgaatttgacgaagaacaagatgctgttcatgaagatcgtcatattttctacttatcaaatattgaaaataacgttcgcgaatatcacagaccagagtaatctgtgtatttgaaagacatttaaatataacctaaaaacagcagtaagacagcttctcattgaaatcgtcttactgctgttctctatttataacacttcgtattgaatgaattcattatgcctatttgacacattattgaaatttttaatataccccttatacgttacggctttgtactgtgtttaggtatataaagctttgacatatcgatattctccaactctaacagcttaattttattattaatcgttccaccgaatcctgttaagctacccgttttaccgacaacacgatgacatggcacgataattgataatggattacttccgactgcacctccaaccgcttgggctgacatttttggcttatcaagcaccttacctacttttttggcaatagcaccatacgttgttagagtcccataaggaacctgtcttaattcattccaaacacactgttgaaaatgactacctgttggctttaaaggtattgtgatttcaggattgtcacctttaaaatacgcgtctaaccactgtgtcgcctctctaaatatcgctaaagacgtattttcttccctagtaccatcaccttgttgattttcaaacaaaacagcggtcagacttaccccatcactcaaaagttccaatcgtcctacaggcgaatcatagtaactcttatactccataaaaattccccctttttctaatcatacgccttaattgttaaattagaaaatattcatgttcacattttttaaaaataaataagtcgtcaattacgtatataaacacgtaataccagctatccctttgctgcaatatacagttacataacttactacacgtgctaacctattactttgtaaaccaaatcttaaattaaaatattgaaaatgcaatggatccttaatattttattaaacctataattacttattaaaaataacacacaatattcataaagttttaaaaatattctgttttatcacctattattagtggaaaagtacaattgcaattgtatatagtttgcataacgcttcaaaagtaatttcttttttgtttagttcaaaaaaatttagaggtgatgttatatgaataacggttttttcaatagcgactttgattcaatttttcgaagaatgatgcaagatatgcaaggttcaaatcaagtcggtaacaaaaagtactatattaatggtaaagaagtttcacctgaagaactagcgcaactcacacaacaaggtagcaatcaatctgctgaacaaagtgcgcaagcttttcaacaagcagcacaaagacaacaagggcaacaaggtggcaacggcaattatttagaacaaattggtcgtaaccttacgcaagaagcacgtgacggtttattagatccagtcattggtcgtgataaagaaattcaagaaactgctgaagtcttaagtagacgaactaaaaacaatcctatattagttggagaagctggtgttggtaaaactgcgattgttgaaggtttagcacaggcaatcgttgaaggaaatgtaccagcagcaatcaaagacaaagaaattatttctgtagatatttcatcattagaagctggaacgcaatatcgtggtgcttttgaagaaaatattcaaaaattaatcgaaggtgttaaatcttcacaaaatgccgtactattctttgatgaaatccatcaaattatcggttcaggtgccacaggaagtgattcaggtagcaaagggttatctgatattttgaaacctgcattaagtcgtggtgagatttctattattggtgcaacaacacaagatgaatatcgaaacaatattcttaaagatgctgcattaacgcgcagatttaatgaagtgcttgttaatgaaccaagcgctaaagatactgttgaaattttaaaaggtattcgcgaaaaattcgaagaacaccatcaagtaaaattaccagatgacgtattaaaagcatgtgttgacttatcaattcaatatattccacaacgattattaccagataaagcaatcgatgtgttagatattacagcagcacatttatctgcgcaaagtccagctgtcgataaagttgaaactgaaaaacgaatttctgaattagaaaatgataaacgtaaagcagtaagtgctgaagaatataaaaaagctgacgacattcaaaatgaaatcaaatcattacaagataaattagaaaacagtaatggtgaacatactgctgttgctacagttcatgatatttcagatactattcaacgattaactggcattccagtttctcaaatggatgataacgatattgaacgtttaaaaaatatttctaatcgtttaagaagtaaaatcataggtcaagatcaagctgtagaaatggtttcacgtgcaattcgccgtaatcgcgctgggtttgatgacggcaaccgtccaattggtagtttcttatttgtcggccctactggtgttggtaaaacagagcttgctaaacaattagcaattgatctatttggtaataaagatgcacttattcgacttgatatgagtgaatatagtgacacaacagctgtttcaaaaatgattggtacaactgctggttatgtcggttatgatgacaattcaaatacgttaactgaaaaagtacgccgtaatccatactcagtcattctatttgatgaaatcgaaaaagcaaatccacaaattttaacattgttattacaagtaatggatgatggtaatttgactgatggtcaaggtaatgtcatcaactttaaaaatacaattattatttgtacatcaaatgctggctttggcaatggcaatgacgctgaagaaaaagatattatgcacgaaatgaaaaaattcttccgccctgaattccttaaccgcttcaacggcatcgttgaattcttacatttagataaagatgcattgcaagatatcgtcaacttattattagacgatgtacaagttacattagataaaaaaggtattacgatggacgtttctcaagatgcgaaagattggttaattgaagaaggctatgatgaagaattaggtgcacgtccattaagacgtattgttgaacagcaagtacgtgacaaaattacagattattatctagatcatacagacgttaaacatgtggatatagatgttgaggataacgaattagtcgtaaaaggtaaataacgacactttaacatatcgcgcatcaaaaatgagcatcaggtcgcccttgcctgtgctcatttttttaattatttccctggaaaatgattcgctgtgtgctgttctattccacaacaatcacgattaatgtcacatgtaccacattttccttgtttcgaacgcttgaaaaattttactagtgtatataaggcatatccgaaaattgctaaaaaaattaaaatgttaataatgactgacactttaaccactccttaaacaaataaatgtccgacttgataaaaaatgaatgttaagacatatgcagtgactagaggataggcaactgcaagtgccgtccatttccatgaataagtctctttacggattgctgccactgtagaaacacaaggaatatacaatagtataaatatcataaatgcatacgcagatagcggtgtgaattgattttgaatcacattaacaaggcctgcatcacctgatgaatagataatcgccatcgaacttacgataacttcttttgctaaaaatcctggcactaacgtagcacctgcttgccatgttccaaatccgagcggttgcactaacataccaaagaaactaccaaccatatgtaaaaaactttgattgatattcacattgataccatgtggtcctacataacttaatagccaaatgactactgagccgccaaaaataaatgtacctgctttacgaacaaagcccttagccttttcccaagtactacgccacaacgttttaatggaaggcacacggtatgttggcaattccacaataaagattgcattatcattttttaaaatcgtcttagtaagtactgtactgactaaaaatgccataataatacctaaaacatacaggcttaatactactaaagattgattctctttgaaaaagatacctacgaacaacgcatacactggcagtctagcagagcatgacatgaatggtgcaattaatatcgttgttaaacgctctttttcattttcaatactgcgcgcagccataatactcggtacattacaaccaaatccgataatcattggtataaaagacttcccgcttaaaccgaacgattccataatacgatccattaaaaccgcaatacgtgccatataacctgaatcttctaataaagatataaagaaaaagagcacaacaatttgtggtacaaagactaatactgatcctacaccagcaataatgccatctgtaattaaatcttgtaaaaatggtataacccctagataattcataatcgtcttcacactatctgtaaatgtaccacctataaatgcatcgagttgatccgacaaaggtgtgccaatccatgtaaatgtagtttgaaagatcaaccacataattgctagaaagataggcatccctatatatttatgtgttaatatcttgtctattctagagctgaaatattgcttatcttcatctggatacgttaccacgtcttgcaataacgtctcaatataatgattgcgtatacgctccatctctcgacgaacagatacagcccctacttgttcagcaacttgatcacgtaaactcgacaatttatttacaacctctgaattaagttcgtttgcaatttgcatgttatttaataagaattgaatcgcaataaacctagcttgatacttatcatgagatgtctctgtcattattatttgacacatatttttaattgtctcttcaatcttctcaccataattgattttaaaatgcggttgatacccttcccctagatgctttatttcgccaagtaaatattttgttcctttgcctgtacgtgccacaactggaaaaataggtgtttttaactttttcatcaatttatgataatcgatttttatcccgcgctttgtagctacatcaatcatatttaatccgatgtatattggttgattaagttctaacaattgtactgttaattgcacatttctttttagttgactcgcatcaacaatgttaatgattcctgaaaatgaatcgtttaataaatagtctgtcactacagtttcatctttagaaatcggcgataaatcatatgtacctggtaaatcaattaattgtcctacattttctttaagtttccctacttttttctctaccgttacgccactccagttgcctatatattcatacgaaccagttaaagcgttaaacaaagatgttttaccaacattaggatttcctaaaatacaataattttccattcgtccggctcctattcttctaatgcaatagaacaagcatcgcaatgtctaatacttaactgttgtccgtttacttcaataatacatggccctttaaataaacatttttgtttaatcgttatgatagcgtcatctgttaacccaaaggcacttagacgatacaacatattctcattagcaatatccattcgctttattttataagccttattcatttcaccatttttaatgtttaacatactatttcgctctcctattagaaataataatcattatcacttaaaaatcataacccttaaaattgtagctcgcaatactttatttaaataattttcatttttcatgtaaaatttgcgacattgcaaaaatgttttgtataatcacttccatgcaaaaaacctccgcttcaaatgtcattgatagacatttaaagcggaggcatgtacatgttattttatgatttatttcgtagatttttttctaacaattgattgagcttttcaatatttttattcaactgttctatattcgttacttgttgttttgaatttagttgatgcttgttttgataatctattaaagcatcatataagaacaatgaacttgcagattgctgtttcacttcttggtacaatgccatcgttttatcatctagtactattgaatgtgcatcatcttgcccatgtacatcttgatgtttcgatacatttgttgcaccttgtggatatactttaaaggttgtgtcgtatgtttccttactatctttggcttcagattcctgtgattcaaccgttttatatttttcaagtgcatgtccttcaatatcaactcgtggaataatgcgattcaaccatgctggtaaataccacgaaccttttccaaacaatttcgttaatgcaggaattaacatcattctgactacgaaggcatcaaagagtacaccaaacgctaatgccatacccattgatttaatcatgacatcttcttggaatacaaacgcaaagaagacactaaacataattaatgcagcggctacaataacaggaccgctttctttcaatcctactttgatagaataatcattatcccctgttttactatattcttcatgaattcgcgacataaggaagacttcataatccatcgctaatccaaataagatacctatagtaataaccggtaaaaatgctagcattggtcctgtcgtttcaataccaaacagacctttcataaaaccatcttgcattactaatgttgtaaatcctagcgttgccattaatgacaagacaaatcctaaaactgcttttaacggtattagaattgaacggaagacaatcattaataagaaaaatgccaatacaacaattactgttgcaaataaaggtatcgcctcatttaactttttagacatatcaatattaatgacactttgtcccgaaatctccgttttgaacccatatttatcttgtgcatctttatgataatctcgtaaatcatgcactaaatcatttgtgctctctgcattaggcccttgcttaggtatcacgaccatcaaagcataatcattatctttactcatttgtggcggcgtaacgatatctacatttttcttatctttaatatctttatatacagactgtaaatcttgttgtaatccttgtggatcatcttttttatctttaacatttatcaacatcggaatttggccattaaatccttcaccaaatttatccgagattatatcgtaagcttttttctgtgtagaatctgctggtttaacaccgtcatctggaataccaagtcgcatatgactaactggtattgcagctgctactaatatgattaaacctagtaatactgccgcaagtgcatttcctgtaataaatttagaccacggcgtatcaatatcttttttaaaattagactgcaatttgttcactttaatgcgtttatggaaaatactaattaacgcaggtaataaagtcagtgcactgaatacagcaaatataacactaattgccgaagcaaaccccatcactgctaagaaatctatgccaactagcgataaaccacatacggcaatcacaactgtcacaccagcaaaaacaactgcactacctgctgttcctattgcaagaccaatgcctttaatgtaatctgtttcagttttcataacttgtcgatacctgaataaaataaacaaagcataatcgataccaactgctagtccaatcattacggctaatgtcaatgtgacatttggtatatcaaatgcataagttaacaaactgataatacctacaccagaggctagaccaatcaatgcacttataattggtaatcctgcagcaatgactgaaccgaatgtgattaacagtacaacaaatgcaacaataataccaactagttcagaattaccgcctacttctgtagatgtcattcctgtaccagttaactctgtttgtacattatgattgtcacgtaagtctttcaaatgacttttaacattatctctagagccatcttttaaagatgtttgactaacgtcatatgtgatatctgcaaatgcagttgttttatctttactaatttgcttattttcatatggatctgatattttatcaatgtgcttgtcatctttttttatatcctctaatgttttcttaatgtcttctgcaatgttcggttgcacaataccatcatctttagtcgtcttaaagacaacacgtatttgtgccttttcactatcttgattaaaatgtttttcaatctttttattcgtatctaacgactctaatcctgtcattttaatatcattgtcaaatttcggtgcatttgtagcaagtggtatcaatattgcagctacaatcactatccatgcaatgaccgcggaccatttatgttttgcgatgaatgtccccatcttatataaaaattttgccaaagtatattgcctccttttaaaatcaacgttatagtttaaatatacagtgtagattattgttcgattatagtatctatccccgacctcttaaagaatcaattggaaaattttgtatattaaactacacacaaaggagaaatgtagatgaaagagactgatttacgagttataaagacaaaaaaagcattgtcgagtagcttgctacaattgttagaacagcaattattccaaacgattactgtcaatcaaatttgcgacaatgcactcgtacaccgcacaacattttataaacatttttatgataaatatgatcttctagagtatttgttcaatcaattgactaaagactactttgctagagatatcagtgaccgtcttaatcatccattccaaacgatgagtgatacgattaataataaagaggatttgagagaaatcgcagaattccaagaagaagacgctgaatttaataaagtattaaaaaatgtctgcattaaaattatgcataacgatatcaaaaataatagagaccgtatcgatattgacagcgacatcccagataatctcatattttatatttatgactcgttgattgaaggttttatacattggataaaagatgaaaaaattgactggcctggcgaagatattgataacattttccatagattaatcaatattaagattaaatagtagatgagaaactcatgagcgttaccaacattcataataaaaacgatagtgtacacgttaatgaattcgtgtactactatcgttttttatttttatcgtgcttatcgttattaaaataactgatacacaacacataaactatgaagaaaaaaataaatccgctatctaaatgactttgactcagttgtttatatgaccaaattgctaatacaattcccattattattgaaataacgtatctcacattcttatacctataatccttttctaaaaatatggttgctattacttaatttttaaagttataaataaaaagagccaaccgcaatggatggcccttgttcattatgaagcattagaacatttctgaaacaaccttttgttctaagaagtgtaataagtagtctgggctacctgttttagcgtccgtacctgacattttgaaaccaccaaatggatggtatccaacaactgctgaagtacaacctctgttaaggtataaattacctacatcaaattcgtttaccgctttaatccaatgctcgcgattatttgtaatcactgcaccagttaaaccgtaatctgtatcatttgcaacctcaatggcttcatcaaaatcgttaactttcacaaagccaacaactggaccaaaaatttcttcttgcatgattctatctttagatttaagtcctgaaatgattgttggttctacaaagtaaccttttgaatcatcagtgccgccaccttgttctaatttaccttcttctttaccaatctcaatataatttttaatcttatcaaattgttttttattaataactgggcccatatacgtattgtctacagtattgcccaacgttaattcttttgttaatttgattgatttctctaatacttcgtcataaacgtctttatgcacaattgcacgtgaacatgcagaacatttttgaccagagaaaccaaacgctgacgttacaatagcttctgccgccatatctgtatcaatattttcatcaactacaatggcatctttaccacccatttcagcgataacacgtttcaagaagttttgaccttcttgaactacggcactacgttcataaattctagtacctgtcgcacgtgatcctgtaaatgtaacgaaatgcgtatctttatgatcaactaagtaatcaccaatttctttcggatcaccaggaacaaagttaactacgccttttggtaatcctgcttcttctaaaatttccattaatttataagcgatataaggtgtatcctcagcaggtttcaataacactgtattacctgcaacaactggtgctaaagtcgtaccagccataatcgcaaacgggaagttccacggtggaattgtaacacctgtaccaattgatttatagaaatatttattgtgttcaccttcacgatcaagtactggcttaccttgagccaaatccatcattgaacgtgcatagtattcaataaaatcaataccttcagctgcatcaccaactgcttcatcccatggcttacctgcttcataaaccataattgctgcaatttccgcttttcgacgacgaataattgccgaaacacgtaacataagctctgcacgatcatttgctgaccatgttttccaagatttataagcttcgtttgctgctttaaatgcatcttcaacatcttgttttgttgcctttgatgcatttgcaatcacttgtgatgtgtctgcaggattgattgatttaattttgtcatctttgaaaatcttctctccattaatcactaatggtatgtcttgacctaattctttttccacgtctttcaatgctttcttaaacatatccacattttcttggactgaaaaatcgtaaccaggttcatttttaaattctactaccatgtacacttaccccctataaattttgaaagtggtttaaccctttgatttaatgatataacatcatttaaactcattttactatgattaaggttagttttgcaatcgctttcatttttatgctttatcacttattctcaagtattttgaaattgattggttactttttaaaatttatatgggtcgcaactgctactttatcgtttcgtcatttaatgtttcggatggtaggtcattatcaattttacgaacgactttacaagggtttccaaccgctaagctgtgtggcggaatatctttagtgacaacactaccagcaccaatcacactgccttctccaatcgtcacccctggtaacacggctacatgaccgccaaaccaagtattactgccaatatgaatgggtccggctttttcataaccttcatttctatgataaaaattaagtggatgtgttgctgtgtagaatccacaattaggtcctataaaaacattatcgccaattgtaatctgtccaccatccataaaataacaattggtgtttacatagacattttttcctagtttaacgttccaaccataatctgtatcaaaaggaatcgaaatacttacattgtctgttgttgtttgaaataattgatcgattaattcctttcttttatttgtatcactcggctttgtatgatttaattcaaagcaaatatctttcgctcgtgcacgttcattgattaagtcttgatcaaagtttgcatcgtaccatttttctgctaacattttttctttttcagtcattacacctttcaactcctaataacttatttacttgtttaaaagttaatcaaataaacattcgcctatgcaactaatacgctataacattatgaaatcatgaccttatcacccttatctatacaattctcgcatcaaatactgctaaagtagtagataaattcaatactacagacgcattcattttttaatctattaacgtacaatgtgagtaagagaaatataaaggagtatgatagcgatgagaatattaattacaggcacagttgctatcttaatcattctaggtttagttaaaacgatacaagattacgaaatgacaaacgatacaagtcgtcagttgtcagacaacaaagatgatgataaagtcatccatcttaataatttcaaaaatttacatgcgaaagaatttaacccatctgatttcttttaagtcacctaagaattgcaaatccagaagtcatttaagttttacctttcattcatacatcctttaatattaattacgacttcttttatatagatgctaaatagagagattgttgtgcaatgtttgcacggcaatctctctttttctttttaaaattggtaaaagtaaaacgcaacgattgacttatatacctagagggggtacattagacgtgtaacaatgaatcacagggaggcaataatgtggctaatacgaaaaaaacaacattagatatcactggtatgacttgtgccgcatgttcaaatcgtatcgaaaagaaactgaataaacttgatgacgttaatgcccaagtgaatttaactacagagaaagcaactgttgagtataaccctgatcaacatgatgtccaagaatttattaatacgattcaacatttaggttacggtgtcactgtagaaactgtcgaattagacattacaggtatgacttgtgctgcatgctcaagccgtattgaaaaagtgttaaataaaatgaacggcgttcaaaatgcaacggtcaatttaacaacagagcaagctaaagttgactattatcctgaagaaacagatgctgataaacttgtcactcgcattcaaaaattaggttatgacgcgtctattaaagataacaataaagatcaaacgtcacgcaaagctgaagcgctacaacataaattgattaagcttatcatatcagcagtattatctttaccactattaatgttaatgtttgtgcatcttttcaatatgcatataccagcactatttacgaatccatggttccaatttattttagctacacctgtacaatttattattggatggcaattttatgtaggtgcttataaaaacttaagaaatggtggcgccaatatggatgtacttgttgctgttggtacaagtgcagcatatttttacagtatttatgaaatggttcgttggctaaatggctcaacaacgcaaccgcatttatactttgaaacaagcgccgtactacttaccttaatcttattcggtaagtatttagaagctagagcgaagtctcaaacaaccaatgcgcttggcgaattattaagtttacaagctaaagaagcacgcattttaaaagatggtaatgaagtgatgattcctctaaatgaagtacatgttggagatacacttatcgttaaaccaggtgaaaagatacctgttgatggcaaaattattaaaggtatgactgccatcgacgaatctatgttaacaggtgaatctatccctgttgagaagaatgttgatgatactgtaattggttcaacgatgaacaaaaacggtactattactatgacagcaacaaaagttggcggggacactgcgttggcaaatattattaaagttgtcgaagaagctcaaagttctaaagcgccgattcaacgattggcagatattatttctggttatttcgttcctatcgttgttggtatcgcactattaatatttatcgtgtggattactttagttacaccaggtacatttgaacctgcacttgttgcgagtatttccgttcttgtcattgcttgtccatgcgcattaggacttgctacaccaacttctattatggtaggtactggtcgcgctgctgaaaatggcattttatttaaaggtggcgagtttgttgaacgcacacatcaaattgataccatcgttttagataagacgggtaccattacaaatggtcgtccagtcgtgacagattatcatggtgacaatcaaacgctacaactgcttgctactgctgaaaaagattctgaacacccattggcagaagccattgtcaattatgcaaaagaaaagcaattaacattaactgagacaacaacatttaaagcagtacctggccatggtattgaagcaacgattgatcatcaccatatattggttggtaaccgtaaattaatggctgacaatgatattagcttgcctaagcatatttctgatgatttaacacattatgaacgagatggtaaaactgctatgctcatcgctgttaattattcattaactggtatcatcgcagtggcagatactgtcaaagatcatgccaaagatgctataaaacaattgcatgatatgggcattgaagttgccatgttaactggcgataataaaaacactgctcaagccattgcaaaacaagtaggcatagatactgttattgcagatattttaccagaagaaaaagctgcacaaattgcgaaactacagcaacaaggtaagaaggttgcgatggttggtgacggtgtaaatgatgcacctgcattagttaaagctgatatcggtatcgccattggtacaggtacagaagttgccattgaagcagctgatattactattcttggtggcgacttgatgcttattcctaaagccatttatgcaagtaaagcaaccattcgtaatattcgtcaaaatctattttgggcattcggctataatattgccggtatccctatagctgcattgggcttacttgcgccatgggttgctggtgctgcaatggcactaagttcagtaagtgttgtcacaaacgcacttagattgaaaaagatgcgattagaaccacgccgtaaagatgcctagattccttaataatgaaggattcgttggtgattctgagataggctagtgattgactctataatgtcgcggtttacagttgggtcttcgctccaactgcatatatagttacacttttcgcttagcgaattagtgtatcttacctaatagcttcgcctattaggttccatcattattataaataataagtacactatggtttacagttggatcttcgctccaactgcataagagcctgagacataaatcaatgttctatgctctacaaagttataatggcagtagttgactgaacgaaaatgcgcttgtaacaagcttttttcaattctagtcaactttgccggggtgggacgacgaaataaattttacgaaaatatcatttctgtcccactccctaaaaggaggtgaatgctatgtcacaagaaattttaaatgttgaaggtatgagctgtggtcactgcaaaagtgctgttgaatctgcattaaataatattgacggtgtcacttcagctgacgttaaccttgaaaatggtcaagtaagtgttcaatatgatgacagtaaagttgctgtatctcaaatgaaagacgcaattgaagatcaaggttacgatgtcgtttaattaggcaatattcaacgtcatcaacaccaaattaaaaaaatcgaactgatgagaatcccaacaatccaaattatctcatcagttcgatttttaatttactcgtaacctagtatctccagtctgcaatacatctaatgttgcatctaatgcatcgacaattagatttttaactgcagcttcagtataaaacgcaatatgtggtgttaatatgacatcttccctgtcaatcaacgattctaacaatggatcgttcggtgttttgcccctttgatcacttgggaaaagtttgcgttcaaattcatacgtatcaagtgctgcacctttaatcacaccattgtctaatgcgtctaataacgccttagtatctactaaagaacctctcgcacaattgacaaatactgcgccctttttaaaatgtttaaataattcagcattaaatagataatgattatatttcgttgcaggtacatgtaatgtcacgatatcagcaccttcaaccgcttcctcaatcgtatctttgtaatcgacatacgttgcaattttagcattaggaaacgggtcgtatgcgaccacatcactttgataaccattggcaaatatatcggctactacacggccaattcgacctgtaccaataacagctacttttaaatctttaatggatttcgataaaatagtaggttcccatctaaaatcatgctcccgcactttcgtttgaatttgattaaaatgacgaaccacattaatagcctggttcacagcaaactccgcaattgaattcggagagtatgacggcacatttgacacaatcaagttatacttgtttgctaactccaaatcatatgtatcaaatccagcactacgttgtgcgatttgtttaatacctagttcatttaatcgtttataaacatgctctgataatggtatttgttgtgatagcgataagccatcataaccagcgacaccttcaacattgtcatcagttaatgcttctttagtaatatctacctcaacatgatgtttctctgcccacgccttgatataaggcatatcttcatcacgtacactcatgattttaatttttgtcattttaacatcacccttaactttattattcatataaatatgctagttctgttaatcttattgcagcttcgtctaatttctggtcatctaacgccaatgaaattctcacataacgattaccattctctccaaatggtttccctggagcaacaagtattgacttctcttgcactaaaaattgctcaaattgctcgctgtcataaccaggcggtgtttccaaccatacatatatgccacctttagcatgaacaaatggcaaatcagcttttgcaagcatggcttcgaatcggtcacgacgtgttttaaatacattgctttgttcttctaaaaaatcatcataatgattcaaagcatatattgcggcatcttgtaatgcaccaaacatcccagcatttgtgtgcgtttggtactttttcaaagcttgaatcatatctttattaccaactgcaaaaccgactctaaaacctgacatgttataacctttagacaaggaataaatttcaatcgcaacatctttcccattttccgaagcaagtatactaggatttttagcgtcgaaaccgaaagcaccataagcaaaatcatgcacgattttagtgtctgtacctttaaatttagctatcgcttcatcaaaaacttctttcgtagctgtcgatccagttggattatttggatacgttaaataaatgagttttgttttatctattatttgtgaatcaactgtggaccaatctggcaaataatgtggcggttctaaattaagcggaactggcttgccatcagctaaaagtacacctgctaaatagtccgtgtagcctggatcaggtagtaatacatagtctcctggattgataacacatgttggtactgccactaatccattttttgtaccatataaaatgcatacttcatcttctttatctaacgtcacattatattgtctttgataaaaatctacaatagcttgcttgaacgcttctttaccatgaaaagcaccatatttttgattttcaggaatagttagtgctttttgaaaatgatcaataataccttgtggcgtgggcccatcagggatcccaactgccatattaattaatggcaatggtccatgttcgattttacgtcccatcgttttcccgaaataactatcagggatatttgctaatttgttagagatcatcaaattcctcctctatcattaaacatagcctgggcgactatcataatcctaacaacttgtatcactctcatttagatggttacaatgacatcgccattcaccgttatgttcaacagaacttatgacacacgttgtattgaatgaatttattttcattttaggtaggtacattattattgtcaatattaggaattttcagattaatatgcactcaatcgttatgatttaactgtcatgcatatccgcatgcgcaaccagttagatatgcttatataaagtataacgcccctcaaggtacgtattcaaacgtgaaccttaacaggcgcctattcattgttaaataaaacttctttagaacatacttatttcactatgccttttactttccccttatacttttctcacatctttctcttagactactcccttatacgccccgctcaatatctttaatcatttcgtctacagttattttcgcacttgttaagacaataggaacgcctgcacctgggtgcgtacttgcacctgcaaaatataaatctttataatctcgcgatacattttgtggacgataataattactttgcgctaaagttggcattaaaccgaatgccgaaccaaatttcgcatgatacgtttgctcaaaatcatttggcgtaaagattgtttctgaaacaatatgcgattttatatcttcaaatacttcaattgttgctaatttacgataaataatttcctttatttgttgcgtcaaagcttcatctgaccaatcgattccgctacctgttttaagttccggcgtcggcattagcacataaataccagttttgccttctggcgcaagtgatttatcagcgaccgctggtacatacacataaatagaaggatcatatgataaacgtccctcaaatatttcttcaatattgcctctaaagtcatctgaaaaaataacattatgaagtctcacttgatctgtcacatcaatatctataccgatatacattaaaaatgctgaacaagagtaatctaagtctgcaattttatgtggtggatactttttaataggtgcaaaatctggcattaatgattccgcaacactagggaaatcagccgtacataaaattttatcaaattttcttatgtcaccattcacttttatcgcatcggcccgtttgaatttaggatcaataataatttgctcaatttcagcatttagttcaatattaacgcctaagtctttatttaattgcgctagcccttgagccataccatacataccgcctttaataaaatgcacaccaaacatcatttcaatcataggaataattgaatatagtgacgggcctcgttttggatcaattcctatgtataacgtttgaaacgctaaaagcttttgtatcttttcgttatcaatataatgttcaattagctgatctgcatgatttaacgtttttaacttagcaccttgcacaagtgacgtcatattataaaagtcactcggtttgcgatacgttctttctaagaaatagcgacgtgcaatttcatattttttataaacatccgttaaaaaggacataaaaccatgcgttgaaccaggttctatactttctagcatttgctgtaattcagctaaatctgtaggcaccgttatacgatcatcgtggtcaaaatacacatcgtaaatataacgtaattgtctcaattcaatataatcttcataatttttaccacacgctgtaaaaacatctttataaacatctggcatcatgacaattgtgggacccatatcaaatgtaaagccgtctttctttaattgattcatacgcccgcctacattattatttttttcaaatatcgtcacttcatgaccttgagaagcaatacgggctgccgctgctaatcctgtgacacctgcaccaattactgcaatcttcattattcaaccacctatattctatgatatttactatttatttcatgaaacaactttgcctttttccgcttatccacaaaaacacgttcatgtaatgtatagttagcctgtctcacttcgtccagtatttcaatatatatacgtgctgctaattctatgattggttgtgcttcaatactaaatactttgatttgatccataacatcttgaaaatctttttctgcgatagctgcataatattcccataagtcaatataatgattattaacaccattttggtacacttcagcaatatcaacttcatattgctttaatcgttgcttactaaaatatacccgttcattgtcaaaatcttcaccgacatctcttaatatattaatcaattgcaacgattcaccaagtcttcttgcgacatcgtatgtctgatgtgtttcatgatcacttaaaatcggcgtcaatacttcacctactgtaccagcaacaccataacaatatccgaataattcagcgtccgtttcaaacattgtaaaatgttgatctttatatacagtatcaatgagattataaaaagattgaaaggcgatatttttatgttgtgcaacatgctgaagcgccatcatgattctacgatcactttgaaagtgatgatgttcatatgggtatttttcaatagattgtatatcttcttttatttgatttaaaaattgaatatcgccataaacatctatactgtcatcaattttacgacacacagcataaattgcccaaaccgcttttctttgatcttctggtaacaagtcaaaagcgtaagaaaagctttttgaatgtttcttcatgattttatgacaatatttaaaattcatatccatcattgtcatactagtcctcctatattgaaatgccattaccttgatttattgttctttagatatagaatattgacgacctttccattcaactacaccataacgatgcgtttgtttccaagattggatgaaaattttagtaaaaaacataaataacaatggatgacataccattaataaattagaaaattggccgacccttcgatgcagataaataaattgtgtagtatagctcaagtaaagtgctaccatttttcttacagacatttggcgatattttaaactaagacatagccctaaaatactcgctatagaaccgaacaaccacaacacaattgctgtcatgatcttaggctttgtgccacctgccccagttgacaaatgctttgtccatccttcttgtaatgactgaaatccttcttgatacatgcgaaatgcaacaaatggaaatccttcataaactgttacgggcaatgattgtgaagtatatgcacttcctaaagcaaatccttcaataatatgacggttcgcacttttatgacctccagttgcataataatcttctttatttgttaatgtcaccggtccaaatgcatgctggttagtccgaccgtcgtctaaggtagaaaatacattcataccaacgactgtcattaaattaaatatcgctgaaaacccttcgtagaaacgctttgttatatgataaggctgtacgcttaacaatcctttttcaccttgtaattgatactgattaatcaacgtttcaacagcatctttccttaagaaagttacatcagcatctacaaaggcaatacgattcgtacatgcatgcgtcacaccttgataacaagcatgtgatttcccataccatttgccgtcagtatcatcaacaacatctactacagtcgcaccatatgaacgtgctacacgtgctgtttcatctgtcgatccgtcattcataacaatgacatctactggaacttgctgttgtattatcgaatgtagtaaatgacctattcttttttcttcatttctagccggaataataattgttaatgctttatgattgaagttcagcgttttcgtctttagctgatgtctacgattaaatatcaatgcaccacacgccatagacatggtcactattactgttaatattcgtgataaccatttcatagatatcacttcctattcttcgcttctcgcgcgtttattttgtctgcgacttgttgcccacttaatgtaaccattggcatgccaccaccaggatttactgatccacctacaaagtacaagttttcaaaatactgactttctttaggaaatttaaatcctttgtttttctttttatctgctacaacaccatatattgcaccacgattagaacgataatttttttcaatatcctccggtgtccaaacatcttcataaataatgtgttttcttaaatcagtaagtcccattttttctaatttatccaaaattttatccctaaacttcgcataatcttcagtggtaaaaggctgatcttgaatatatggaatatgtggtaagactttgatattttcataacctactggcgcttgtgtgtgatcagttttattcgtatttactagataaatggtcggatcatctggcaataccttttcatgaaaaacttgttgataattgagataagcattttccgtaaaaaagaaattatgatgtgctaattgcgggtattggcaagcaacacctaaatgcatcacatatcctgagcttgccggctcaaattccctctctaatttgtttaatcgttgagtatcaaggtgaattaaatatttataagtaggtatgacttccatatttgaaataatataatctgcctttacaaactcacctgtatctaatctgacacccgtcacacgtctttgatatgttttaatattgtccacacgtgcacctgtatgaattgtgacaccttcttcacgcgctagcttttccaaggcattggctaaatgatggattccaccttctacataccaaaggccttgctcttgttgcatatggaataacatagataatacagctggcgcatcgtatgatgaagaacctacatatttgataaaatagcctaacatttgtcgcaagtatggattcgagatacgcttgtctatggcctgttgcatagtatgtacataatcataattaataagagcatttaatggcccatgaaatttaataatttgagatagtgtatctaaaccatagttaaaataccctttttcagtaatacgatcgattcgtcttgtataattcaaataattttgcagttcctctatatcctgtttcgacaatatcgcattatgctgacctgtttctttaataccttcatacaaatcgatagtcgtgccatctggaaaaaagctacgccattgatgtggcaaacgcttgattgtaacgtagtctgacatttgcttcttgctatattcgaataatttttcaaaaatataaggcatcgttaaaatagatggacctaaatcaaagccaaagccatctgattcatgacgattcactttgcctcctatatgagtattttgttcatataatgagaccgaatagccactttgtgccattcgaattgctgcagaaatcccacctaagccaccaccaataacgatgatatgtttagtcatgacgttcacctcttcgttttaatatgcgtagtaactgcgttaatctcggtcgattatagcgttgcacaataatgattggaacattagctatcattgcatagaaaatatttatatactttactaaacgagagcctttattgaatatgatgactggaagtatcgatatccaatgaatcaactctgccctctttgtctctataatcattttttcaatttcatcagtattgattgtcattaaatgacgctgatcatatatattttgattaagctgatgaccatctaaaatcttatgtttccattttcttacgtaaaaccatttgttccaaaattttccatgcttctcaaaattaaatgatttaaatattatgtacttctgacgaaaatacttatcaggaattcttgtacctaaatttgctatatttagttgaacaattaaccaatacatactacaaaaaaatgctgttttgatatattttttcatggttttcatctaaattgaatcactctcaatcatactgacatagtataaattatcactttattacttagttccctaaagatcagtgaataaaccgctctcatttatatttatataaaacaaaaacgccaatactctcatgttagagaatattgacgtcatttgatttacatttgattaatgaatgaaattatatgaacctgcttggtttgctgaaattgtacgagacgtaaccacaccagcaccatgtccatagttcatttctgaaacacgaacagaaccgttgctgttaacgccttcaacgtaagcaacatgaccgtaatagccttgtgttgtttgcatgatagcaccaacttttggtgtattgttcactgtatagccagatgatgcagctgcgttagcccaattacttgcgttaccccatgttgaaccaattttcccaccaacacgatcaaatacataataagtacattgtcctgaagtatataagttacttcctgatgcataaccattagaaattgaacgaccatttgaagatggcgctgcagttgtagtcacatgaacattattacttgttgtgctataacttgcacctgaaccaccagtataatagttatttgttgctgtttggctattgtttgtatagttattgtattgatatgaatgattatagtagttattgtaagatgcattgttataactataagtattgtagttgttgtagtagtatgtgttgttttgcgttaattgacttggattccaatttcctgtccaagtgtaatgataattaccttgtgcatcaattgtatacgtatagctgtatgattgagcgtcattagaattatatccattgttattttgttctgcggcttgtgcatcatgtcctgcaaatgcgatagtggcaagtcctgctgtagcgattgtagctgtaacgatttttttcataattaaatatcctcccaataatcaaaacactctatacatatagtcattagcgactcaattattttaaattttatattttttatttttttagtatgcaaataattataacttttatagttttgcgacaaaacaaactataacagagattaggtgtcttgcgggctttgttatcataatgtaatctgttcctaataaagcttcattgaatgtaatataccaattagaatgtttacaacactttttctgcaccgttaacatgggatttgaaaataaaaaagcactaaacttttaatgaaatacatcatttttgataataaatatcagaagtaatgtaatatttcaaaagtttagtgcatcaagttatttcttatttgtagcatgtgtttccatcgtttttacaatcaaatcagtcagcgctttactacctgcatattctaagtgaataccgtcatatgcaaagtattccggatgacctgcagaagctttataccaatcgactagatgtacattagagcgcttttcagctgcctcataaattaatttatttattctaccttcataatctctaggtactctaatagaaactaaatatatgtctgcttttccaaaactatccaatagttcatttaattgatctttcgtaaatgccccatttgtaccaagctctactacaactttttgaccttttttagcatagtctttatattgcgatttcacaattggtgtagcatcaacgagttgccgtccaactttaccatcaatttgtgcatttggtattttcttagtaaagacattaccaatatccaccatgaccgagtcaccaattaatagtggtgatgactttttaatatcctctttgctattcgctgtctgcttatcctcttgcttatcttttttaacgacttttttcttcgttgttttaaattccgtcttcttctctttcttctcggcttcatgttgtttgccaagtgcatcaaactgtccactgagcacaacgatagacggaaccaataataggataactaacactgttctagcaaattgccccttctttttaggtaaaaatgcaaaagctttaaatccttttttacgtataggtgtttcaataaagcgatacgaaatttcagccattaacgctgttaacaaaatttctataatataaacgtataccggtatttgtccttgtacgtaataactgttcacaaaaacaatgataggataatgccataaatataagctatatgatcgtttacctataattagtaaaggtttcatacttaaaaatttagcaaataaactagaaggatgtaccgcaattgcaataatgaataaagttgcaaatgatataatgtaaaatcctccattatagatccattgatcttggtcgccaactataaagaacaaagtcattagaaccgcaaaaccagatatccctataatatctaatgatacgacaatctttttagaaatatcttttttcaaagcaaacggaggccaaataaatgctaatatacaaccaagcaataaagtttgcagtcgtgtatctgtcccaaaatacacacgtgaattatctccagtgatgaaatgaatcactatcataagtcctaaagaaatcaacgatacaataaatagcgtttgaataatatttctcggtttaaatctatgtaataagaacgtgataaccaatgggaaaagcaagtaaaattgttcttcaatggctaaagaccataaatgtttgagtggttcaatagcaaattggttaaaataatctacattctgtgaaatgtaccaccagtttgaaacatagaatatagctgcaatagcatctcgtttcatttgtataatcaattccggtttaaatatcagtgtgaacgtaagcacgacacagattaaaaataacactgccggaatgagtcgtttcaatcgtcgcttccaaaactctagcaaatcgattttttgcgtccgataatactcacttatcaacaaacttgttattaaataacctgaaataacgaagaatgtatctactcctaaaaagcccccacttaaccattgtgcattcaagtgataaataatgattcctataactgcgaatgccctcaatccatctaatccgggtaagtatcgcggggaatacattttttctaaacgtttaaagtcttttgtatccatgttaataaacgccccatttatttttctctattttgtagcatatcacaatatttttgaaaataaaatattgcactgattttcattaattgatttaacccttaattaagatagttttaaattttttattaagtagaaaacaattattacagttaatttcattactgcaaaccacatataaatttgtcgattttactacataacatagattatcatagattcttgaatttttagcaaaataactgttattttcattatatttttacaaaaaaaggttcgttttatattttatgcatcttactgtaacagaatcattaagatatgctattcgaatttactttttcaaaatttctataatgaataaattaccatgtattgaaaataaagcgaaatgcagcctatcctctaatttaaaccaagcgatatatcacgtcagcctttatatttaaacgctatgtgtcacttttaaaatgaatattactaagattgtcataccaattattcattgcatcgaattaatcttttaaatttctgtaataaaacctattatctacatctaatttaggaaaactacttggtaaatctcctcgcttaatttcacggaagccattattagaataaaaatactgtgcactaataaatttatcaattgttcctaaataaataccatcgatattttgttctttacatgtcattataactttatctaaaagttttttacctatttttaaattcctataacctttatcaacaaacatttttttaagtgcagacatattattatctagtctaatcaaacctatagtaccaacaatattttgatgattgtttattgcaagccaaaattgccctccactattcaaatagttatgttcgatgttctccaaatcaggttgatcatctctatcaatttttatattaaattcatttttttgaatcgataaaataaactcgattagctcttccttataagacctattatattcaattatgtttatagccatttttatctcctttttcatttaatttaatcataaaatgcgcgtttagtttgtatctagtgtactcagtacagcctcaaatgaagttttattccacttggcacttaataaagacaagtattttagcagtaatacaataaagtccaataaatttccctaacttcaatatccactttttaagaaatgtatttttaattaataaaaaaactctccccaatttctatgggaagagctatatatttaatgtctaaacattacttttatttattatgaaggaattagaatccccaagcacctaaaccttgtgctttgtatgctttaacagctgcgttgatttgttggtcaacagtgtttgtcggaccccaacctggcatagtttggaataaacctgaagcacctgatgggttgtaagcatttacttgaccatttgattcacgagcgatgattgcagcccatgtagaagctgaaacaccagtacgttgagccatgatttgagctgctgatgaaccagtagcacctgcagtattaccattgcttaatctcactgaacttgaagtagttgaagtgctgtagttatggtaagttggagctgaaacagcttcaacgtttgagttacttgattgtgcattgtagcttactgattgtacatctgaaccttggttgtatgaagtagtgtagtctgcacctgcaacgtttgagaaaccagcagtttgaccattagctgcttcatagctccatgaccatgtagtaccatttgaagtaaagttatattggaaaccatcttttacaaagtggatgtcatatgcaccatctttgattggagctgcatttaattgatcttggtgattatgcgctaagtcaactaagtgtgcttgatcaacgtttacttcagcagcgtgtgcttgatgtcctgtacctgctgcgtaacctgttacacctaatgccactgctaatgatgatgccataattgtctttttcatagtaaaaaatcctccagtaataattgtaagtttatgtttttagtaattatattttgaatttgaatgtcgtagtgcaagtttaaattgtcttttatttctttcaacggtactcactatatcacaaaaaaccagccagtaaattacactttctttacaaaacattacaatatcaagtgttatttgtaatgttgaaatatggctgttttatactgtaatgtgaaatatgtgccctttagaatccaatcaacccttgaaatagtctttaacacataagatttttactatatttagctcaactattacagctttcgtaatattacagattgtatttttgttacatagctgtaatatatctgacatgtaacttctcttattttcgtacattaaacgcaattaaaaagcaatcaacacatatgtttctgcacatgtattgattgctattattgttgtatattcaaagttttaaaacacacatcttttgtgaattatcttatcttttataagcacaaataaactgcaactcaattatattgctaaactttattctcgcaattcacaataacattaaataatttttggtctaatattttcaaaaaacatactgtccttatcccatgaatttaaaaatatcattagtatataaacgaaacactttacgataaatgatatctgcaagccaagctgttacaaatggcacaacaaagaacgctactacaattagtaagacactcaaccaagcagaatcaacctccataaatttaaatgcattaatcggtcctaccattcctataaaaccaaatccagctgattctttcgttccatgaatacctactaatgctgataccaaacctgatacaatggctgttgtcaatattggtaacataagaattggatatttcaccatattaggtatcatcattttaacgcctccaaagaagacggataacggcacccctaaacgattcactttacttgtaccaattatcaatactgcttcagtcgcggagataccaattgacgctgatccagctgctaaacctgtaatacctatcgcaaaggcaatggccacagttgatagtggcgaaataataataagactaaataccattgaaatcaaaatactcatgacaatcggttgtaattctgtaaaaccattaaccatattaccgatggctgttgtaatcattttcgtatacggcaatattaaaacaccaattgcacctgaaataccgccaacaactgttgggaatacaatcaatgccatactacctacacgatgttgaataagtaaaatgaacaacactgcaatcgctgctgtaatcattgtattaattaaatcaccaatacccgtaatcatccaagcaccatttttaaactgcgctgcaccgcttcctacatatgctgcacttgccacaacagcaattgctaatggcgataggtcaaatttcatggcaaccaatgcaccaatcaaagcaggtactgtaaattgaattgcaacgacaacgcctaataacgttttaaaaatcggatgataatccataaagtatttaaaaatttctccaagtatcgcattaggaactaaacccgcaacaatacctatggcgacacctgataaaactctaaatataaaatctttgggtgtaattgttttaattgatgtcataatatcatccttccatttatgtatatacatctgtatgcaaataataaagagccttaagttataagctgccactagcttaaattctaagatgtgcatgccgatgttgttatatttaggctagcagtatcatctataactcaagactatgaaaaatagtatatcacaaaattctgaatttttagataaagaaattggcaatttttcaaacatattgttacaatacacttttattttatcttcatttttaaaatccattaatacaatagaagaaagacattcaaatgcttaccaaaaaggtacattatttgttaggagcgtatcaacacttacatatcatcaacacaattgacaatataatagaagatactgataataagtgttaaaacaacagatgttaggtagtgaacaaatgatggaaagtaaatccatagatccaagaatcgttagaaccaaacaattgcttgtcgatgcttttcttaaaatttctagagaaaagaaattatctcaaattacagttaaagatatcactgatattgctacgctaaatcgtgcaacattttacgctcatttcactgataaagaagacctcctagactacacattatctgtaaccattttaaaagacttgaatgataacttgagcatttctaatgtcattaatgaaaaggtgctgcgtaatattttcatttcaattgcgagttatatcaaagatgctgcaaagtcttgcgaattaaatagtgaagcattttgcaacaaagcacatcaacgtattaataatgaattagaagatatttttgcgattatgttagaaaacagctatccggagcatcaacgagatatcattgtaaatagtgcgagttttttagcagctggtatctcaggcttagcattacattggtttaacacgagtcaagagacagccgatgtgtttatcgatcgcaaccttccatttttaattcatcatatagcacatttttaataaaacttggtatttagtcatgcatcttgaaatcactatgtgacttaggttcatacttgtacacacaataaaatttaacatattacgattgattagccgtgtctaggacataaatcaacgtcctatactctacaatgtcatattagcagtcgttaactgaatgaaaataagcttgtcattaaaacatatagattttagtgacaagcatttttgtttttgcgtacttaaacaacacttcaggcaatatgttgtttaggcaacaaatgatatgtgcgtgtttattggcaaacgtacgacatagtagtatagtatgtctaaacaacatatgttgcatagttgatatgcgttgtttaaatactaagataggagggattgacgtgagcgagacagatgaacctcaggggtttgaacgcacgcataatatattaaatattaatcagagtagtctgggtgtagtgacatacattacaaataaattaaagtcgacgttgaagcaacacataataattgctcgtggtaaaaagcgaatcgactatcgactgtcgtataacttttacactacgtattatgataatgtagaaatcaagaaaatcgactgtgaatatacctatgctatgcccattgcaattttaataagacacacgatgtcattcgacaatgctcatttctttgctcagttacgtcatcctgtcttataaaacaacattgcagacatgtatatcaaacgacacttcaataacatcactttgccatcgtactactattaaaatcgtgtctcaaaccccttattttaattccaaaaatctgctggtcaaaagaccgagaaactaaaaacattactggatgtgttgataaattatcttatagaaataaactcaaaatatatcaacacttgattctaaggaggatatgacaatatgaaaattttagatagaattaatgaacttgcaaataaagaaaaagtccaaccacttactgtagctgaaaaacaagaacaacatgcattgcgtcaagactacttaagtatgatccgaggacaagtattaacaacattttccacaataaaagtggttgatccaatcggtcaggatgtcacaccagataaagtttatgatcttcgccaacaatacggttatattcaaaattaatatttgctcacgaggtattgcacttaaggtgccaactgacctcataaacaaagcccatactgattgaagacactaatgtgtccaggctgggacataaatcaatgttctatgctctacgaagttatattggcagtagttgactgaatgaaaatgcgcttgtaacaagcttttttcaattctagtcaaccttgccggggtgggacgacgaaataaattttgcgaaaatatcatttctgtcccactcccacattaaacttcatctctgtatgggctttttatttattcttttgagaatttcattttagcagactaaaaaattaaaatggtgtccatcaagatctttgaacattgcaccataaaacccttggcttactgttggttcttgaacgactgcgccacccgcttctttcactttattcaccaactggtcaacttcttcatttgtgttcacacctagagaaatcatcacttcatttggttcagtattaaggctttgctgacttacattttgaaaatgcttgttttctattaaaattacggttgtttgacctatttgaataccgaccattttatctaacatttgtgggtttctatttattttaaatcctaacgctttataaaactgtgcgctcttttctaaatcttgcacatgcaaattaaaccacattgattgaatcatgattgcaccccattcattacttattatagttttggactttaagccaatcacttaatgataatcttgttggatttatttcagccattaattcaaagtctacttcataacctttttcttccaaccattgcttttctgcaacaccactaacaaattctccttctataacagtagatttacctgtcacttcactaaaaattgttgctgcttcacttaatgtaacttcatcggaaccaatctctattgattgatgcgtaaagctttgtggatgtgcaaaaatatacgatgcaattttagctatatcaatagaagaaatcattgtgaattttatattcggattaataaattctggtaatgtaatacgttcatcttcgactttagcaatgcgtaaaaaattatccataaagaatgatggtttgataactgttgcatttatattagattccattaatctattttctatttttgctagtacttcaaagtgtgggccagttcgatttcgattaacccctcccgcagtactatacacaatatgttgaatattttcttgctcagctatttcaattatcttcataccttgtcttaattcttcgctaacatcatctttaacgattggctgaatactgtataagccatacttccctttcatcgctgattgcaaactaacattatcactcagatcaccttcaacgattgataaatgcggatgtcctatgtctgaaagtttacgattattcttatttctagttaatgcacttacataccatccatcctctaacaactgttttacaactgcattaccttgcttccctgttgcgcctattactaaaatatctttcattttagatccactcctctttttatcttaaaaaccaatagtcctctttttcaccttttaaatacgtatatggttctggtgtttgtccatttcctttaatattgtcgtttattacatctctgacatcccatactaaatgaataaatcgttgtaattgatgactaaaaatgcctagtggcgctgtcatagctaatactttttccacatcttctgtagtgacattcagtttttcagcaatcatttgaaccgataaggtagattcttcaaaatgtgcttgcaactcttcagctgtgatgcgtctttgctctttatttaaagacattatcaacactcttttcttttatgatatttaatagttattgcaaattcattgctaactttcttaacacgttttataataaacggatagttatccgtttgtcaattttagagaattttaagtaggtgtaatcatgcgaaaagatgcaaaagagaatagacaacgaattgaagaaatagcgcacaaactttttgatgaagaaggcgttgaaaacattagtatgaatcgtattgctaaagaactaggtatcggtatggggacattgtatcgacatttcaaagataaaagcgatttatgctactacgtcatacaaagagaccttgatatttttatcactcattttaagcaaattaaagatgactatcattctaattatgaggttatgcaagtgtcgttagattatcttttacaatttaaaatcgataataaggcactactgcaatgtattgaagcaggcaacaataaattacgtttttaccaaagcgcattttatcaagaattatttgatttttattatgacttatttaaaagcgatgacgacacttacacgaagttcaaaacagatatgctgttgcaatcattatcaactagtgtatttgccttccaaatagagcatcgccatatttcaattgaagcgtacagaaattatttattaaacatttatttagatgaggtggaacgtaatgactaaaattgtgttaatcacaggaggcaataaagggttaggctatgcaagtgcagaggcacttaaagcattgggttacaaagtttatataggttctcggaatgatgtaagaggacaacaagcatcacaaaaattaggtgttcattatgtacagttagatgttacaagtgactactcagtcaaaaatgcttataacatgattgctgaaaaagaaggccgtcttgatatcctcattaacaatgcaggtatatctggtcaattttcagcaccttccaaattgccacctcgtgacgttgaagaagtatatcaaacgaatgtattcggtatcgtacgaatgatgaatacattcgtccctctcttagaaaaatctgaacaacctgttgtcgtcaacgtatcaagtggtttaggttcatttggaatggttacaaaccccgaaacagctgaatctaaagtgaattcattagcttattgttcgtctaaatcggcagtaacaatgctaacgctacaatacgctaaaggattacctaacatgcaaatcaatgctgctgacccaggcgctacaaatactgatttagttggtgattttagtaataattccaaacacgtttctgaaggaatcaagccaatcattcaattagcaacgattggtgcagatggcccaacaggtacatttattaatggcgatggagaaatgccttggtagatcaattttatgttacaaacattgaaattagaggtatataaaaaatgcttctgcaatagatgcaatatacatgcaaaacaatatggaggcgaattaaatgaaaagtattacgtttgaagaacattatgtcattgaagatattcaaaaagaaacgatgaatgcgatatcagcagatcctaaaggtgtaccgatgaaagtaatgttagaaggccttgaaaaaaagacaggttttacaaatgccgacgaattatcacatcatgatgaacgtatccaatttatgaataatcaagacgttcaaattcaagtcttatcttatggaaatggatctccttcaaatttagttggtcagaaagccattgaattatgtcaaaaagcaaatgatcaattggcaaactatattgcccaatatcccaatcgctttgtaggctttgcaactttacctatcaatgagcctgaagccgcagcgcgagaattcgaacgttgcatcaatgatttaggattcaaaggtgcgctcattatgggacgtgcacaagatggttttcttgatcaagacaaatatgacattattttcaaaacagctgaaaatttagacgtaccgatttatctacatcccgcgccagttaacagtgacatttatcaatcatactataaaggaaattatcctgaagtaactgcggcaacatttgcttgttttggttatggttggcacattgatgtcggaattcatgcaatacatctagtattatctggcatttttgatcgttatccaaagttaaatatgattattggacattggggtgagtttatcccattcttcttagaacgtatggatgaagctttattcgctgaacatttgaaccactctgtaagctattactttaaaaatagtttttatatcacaccaagtggcatgttaacgaagccacagtttgatttagtcaagaaagaagtaggtattgatagaattctttatgctgctgattatccatatattgagcctgaaaaattaggtgtatttttagatgaactgggtttaacagatgaagaaaaagagaaaataagttatacaaatggtgctaaattattaggtttatcatctaacaattaacaaatggaggtcattgaatatggaaactttagaattacaaggcgctaaattacgataccaccaagtcggacaaggacccgtgctcatctttattcctggtgcaaacggtaccggaaacatttttctgcctcttgcagaacagttaaaagaccattttactgttgtagccgttgatcgtcgtgattatggagaaagcgagttaactgaaccactccctgattccgcttcaaaccctgacagtgattatcgtgtcaaacgcgacgcacaggacattgccgaacttgcaaagtcattaagtgatgaacctgtctatatattaggttcaagttcaggttcaatcgttgcgatgcatgtgttaaaagattaccctgaagtcgttaaaaagattgcatttcacgaaccaccaattaatacatttttaccagacagtacttattggaaagataaaaatgatgacattgtgcatcaaattttaacagaaggcttagaaaaaggtatgaaaacatttggtgaaacattaaatatcgcaccaattgatgcaaaaatgatgtctcaacctgctgatactgaagaaggacgtatagaacagtacaaacgtacgatgttctggtcagaatttgaaattagacaatatacgcattcagatattactttggatgatttcacaaaatacagcgataaaatcaccctactaaatgggacagattctagaggctccttcccacaagatgttaacttttatataaacaaagaaactggcatacctattgtagatattccaggcggtcacttaggttatattcaaaaacctgaaggctttgctgatgtattattaaatatgtggggttaattgatcgttctctaataaaacagcttggacagttttcaaattatatttgatggctgaccaagcttatttttgtttacgtttaaacgttcaaatcaactcgttattatacatgaaggcatgttaaccattctcttccactgaaaacactactgttccaaacattgatagtcttcttttgaaataccctttccgataagcaccaaatattctggcactttttttgaaaatgctacaggtgttaattcatattggccttgtgtaaattgaatgagatacgtatgtgtggtgtcttcaaatgtcataaaccctttcaacctataaatatgagacggaaggcatgctaaacgttttataaactctgctttagtacatgtgactggtgattgcacaaattgatgatttattgttttgtgtaatgattcatgtttattgtcagaagttgctgtcatttgtctaactgatattggcaaagtgacgctgccatgcataccgacttgtatatcggcctctgggttaataacttctaaatctttcaatagtttgctcgttgtttcaacatctgctgaatctattttattaacaaataagacagaacaatatgctaattgctcataaaataagccttggatgtctttagggaatgatttaatgtgtttatacatgcttgcgtctattacaccaatcatatgtgtaattgttgtaaacggagctaaaataggcgttaaacaagcatctaagacagagactggttctgcaatcccactacattcaataaatacaatgtctggttgctcttttaaatataattgatgtaactgttctgatacatctgctttcattgcgcaacagatacacccctctgtcagttcacttaaaggtatgtcttcagatactaaggcaccatcaacactcattttcccaaattcattcatgatgactgctggtttcagcgattcctttaatgattcagcgagcaaatgatttaagacagtcgttttaccgccacctaaaaacccacctataataactattttcatctgcgactctcctcttatacttcatatgaatagcatattccaagatagatctcctattgactgacatgactctatattcagttatagttcatttttttaaataatcagcattactattttaacaatgatgcctacaccaataactaaagacaatgatgtcaccatttgctttccaattaattttagtgctgactgaccacctaaatgtttcaaaagcatcgtcattgtgaccgagcacgctgtaaatgttgaactaaaaaacacaagtagtagtaactgtgttgctgtcattccttgtaataaggcgccttgatgcaaattaaacaagagcatgccgtcttttcgaatcattgaaaataaaatccctggtgacaattctgaagagatgcctaataacgataatataggtgtaaatatttgtgataaaacattcaaaattggcgttagtgataaaatactaacaataagacagattgtgataaaaataggtagcgcttgaacgataaacatttgtatattttgccacatttgtagcaacatttgacgtatatttggcatatgtaattgcctatcataaggtagcggaacactaagttgttgatcattctttttcaaccatatcctattatgtaagatgccacctaaaagtactaatattaagtacggcataaatagccatgactttccagctacactaaaaatagataatgtcgcacctatttgataactacaagaactaccaaagcttattaaactcatacactgtgtcttcgtgcaggtatggcattggtgtgctgcttgtgaaatagctgctgcattacatccaaatccttctaatagtggcacgatatcattaccttgtaatccgatccataacattgacggttcaattgcccatatcatccatgatttgagtcctgtttgatcaattattgcagttgataaactaattaatattacaaccggcaatgcccatacgagcgaatatgttccaagtgatagcacaccataatcaccaaataatatatgctgtaatatatcgtgattgagcaatgttgtttgagttaaatattctatccatgctgatacatactgattttgaaaccaatctgaaaattgataagcgataccaattggcaatgcaaacattaaaaatatcaacaaccaggctaaaaatgtcgcacttattttaggtcttaaatgtcgtcgctcatgttgaaatagtgtcaattgttctatcacatgttcactcgctataggcgaagaaactacactttctgccaatgaaatatctaatttctgttttatgattaataatcttaatttcgctttttctgttgcggtaagtttatccgcatggctaataaccaaataatgaggttcatgaggtatgggcgtataatgcccagttctcatatcatatttcacttctaacatgtgcatgacacttcacaacatgaataatcatctaaatacatttgatttttttggtaattttcaatgacctcttgtttagctggtaagccttcccgctgtgttaaaagatgggcaagtactgcaaatcgcgctctgaatttatagatatagcataatttggcattatcattttcaactgttgcaccaatcataaaaatattcggataacgtgtcgattcatcatgtgttgttaatttaatatcttgatttgttgtcacaaataattgttgaacgattggattttttgttgcatcaaagccagttgctagtattggttcatgaggcgtatgcacactttgtccgctatcaaaactgatatgatactgtccattgttaaaatcaatatctttaactgtataatgtacattcatttcgatgcgagcaccttgcttaatgacattacctagtcgctgacgtgtataaggtgacaatctaacactaggatcagcatccggatcatttaaaccggttgtgctagtataaagtgcgatgtcagagccattttttgcaagttgatatgcagcatcaaagccactttcattacctccgataaccacatattgccccttattaaagttatcaaagtcttcaatttcactataatgaataccatatttaaatggctttttagggaaattataatcacctgttgcgacaaagatataatccgcgtgatatgtctctgttgtcgttgcaatcgtataatatgcatcatctgcagatatatttgtgacaactgtattttcaaagatattcagctcgtaatggttggcaaccacttgtaaatattcagcatatgtttctccggaaatatgttcttcattaaatgtaaatgctggtgaagtatccatggaaattgcattcatatcaggcatgccaaatccattagacgtaaatgatggcgtgatcgtacgggtcgatttcggccaatgtttaaatgaatgtcctactgttcctttttctaaaataatgacatctgttataccgaaatcttttaaggtaatggccatacctatacctgcagcaccggcaccgataatagccactttatgatgttgcatattaacactccctcaatgatctatttcaagttattgtttttgactataaatcgtaataattacgatttataaagtatagacctatccttaagaaatttcaatattaaaagaaaaacttccgttattgtagagaattcatctacatttcggaagttggtatgtgtcttttttattaaatttaaggatgctacggttagttcaaatgattatgaatgacatttaatggtatcatccagcctcagtacttggagataacattttggcggtgagacataaatcatatttttacaaaacttatttcgtcgtctccccaataaagataaagtatttctttattgtggtgtaacttctccacgttgtatttcactatccaaattttgtttcatattttcaaacaactcttgaaatctaacctcatcttgatcagaataacctttaaaaataactgaatctatattttcttcgttaaaataataaatttcatcttccacaacaccaatcggatatttacatgcagaatagtcaaacatatacttttgattttcaatttctacaattggtcctctattaataatcattaacttttgcgaaccttcttttaaataaataatgcttcctattgtttccatttattttcctcctttgtcaccgtctcaatttcaacattccttcgcatttccaagtcaatcatctcttcttccgctttacgaatgccatgttgaatttgctgttgctgctcgtataacgcttccgttgaacgtcgtttcgcaaaatgaaattcatcgcggaactgttccatacgactagccatattgctactatgataacggtcacctaaatgttgatataattgttctatcgaatgattaagctcatcactttcgtctatcaaagctttaacctctcgcttttcatcatataagtcatccatttgcttatgtttcgctgtgatcattttattgattccatcaagtttattcgacatcatttcaccacggtttaatttttaccaatttcattaccaatcattacgtctgtttgattaaattcttcgccaactttttgtatactatcgctcgcatttcttattgcttcagcaacagattgattcttactaatcaaatcgtctatcacactatgagcattattatttccacttactgttgtactttcatctttatccggtttcgacacattattacatgtttcaacggcacttttaatagatgatgatgcactattagtcttgaaaatatcactttgaactgtactcattatttacacctcttcccatttaaattattttaaaattattagaaactgtatcaatatatgatattcaaacattcaataatacttaaatattgttttgtgattatattcaaaattattgtatcaataaatatgtatcattcctagaattttattgaacaaaaagttataaaatcacttttattgcaactcaaccttgttttgcattacagaaattaacaatagcgattaaaattttattttccagcaataaaaaagcacaaatatttttattgaggcaactgaaggccttctcttcataaaatatctgtgcatattatctatttatctcaatctaacgtcttaactaacttgttgtaccttgtaaaatcctatccatagaatgcgcaacactatcacggtacatctcaccaaatttcaataaatgcaccatcaataaatataaacgataaaattcaagtctataggatgctccttttgcgagcggataatgtttattatacgcatcgtaaaattcgctcgtaaaaccaccaaataccgttgtaataccgatatcaaattctctgtcaccatataatggtgctggatcaaataatgcaggacgtccatcttttaaaaacatataattaccgccccataaatcaccatgtaataaagacggtttactttgatgcttttctaattcctccacaatttgacttcgcactttgtcatatactttgatatcgttggcatcccatagccctctatttagcaactcttctttcaaatgatccaaacgtttatcgacaaaaatggtacgccaatcatcttgccaatgattatcaaaagaaatatcgccaccttcataaggtaatgagaagccaaatttgccttcttcttgttgctgactgtgtaattgagctacgagttgacctaattgacgttgactccctgaagctccttcttctaaatacgtcatcactaaatacacatcaccgttaacttcgccacttgcaattactctaggtgccgtgatacctgcacgttcaaattcatttaaacctgcaatttctgcagcataaaatgattctttacgtccacgttggacaagtaagaaaaatgtatccgtatctgtttcgactcgatatgcttcgtttacatcaccaccactcactggtgaaatctctttaatatcttttaaaggtaaatgctctaaccattgttcattcatacaaacaccttccaatctacttactttatactataatattgcctaattaggatgatttaatcttaaaaacgttattcaaacttgcgtcaattttcaaaactttttagttttaactaggaaattatgtagggaaatgctagtctattaaaagaatatatttcacatatattaagttgaggatagtaagcctcaaatataatgaaataggagcatactcatgtacaaattaattaaacctttcttattcaaaatcgaacccgaaaaagcacacggactaactatcgatgcattaaaaacgttacaaaagtttccggttttattcccagtcgtcgataaactatttacttataagaatccaacgttatcacaaacgatacaaggtaatacgtacgacaatccaattggcttagcagctggtttcgacaaatcttgcgaagtaccaaaagcattggaacaccttggattcggtgctttagaattaggtggtatcacacctaaacctcaaccgggtaaccctcaaccacgcatgtttagattattagaagatgacgccttgataaatcgaatgggcttcaataatattggtatgaacaaagcactcagtcatttgcgtaaaaatgcttatcaagtacctgttggtatcaatgttggtgtgaataaaatgacaccttatgaagcgcgttatcaagattatataaaagtcattgatacgtttaaacacgacgtttcatttttcacagtcaatatcagttctccaaatactgaaaaccttcaaaatttccatgataaagatgaattttcaatgttatgtcaagctttgacaacatttaaaaaacagcacgatgtaacagtgccaatttacttaaaactaacgtctgatatggatttcgatggcttaaaagcactattaccagcgattactgagacatttgacggtatcatcttagcaaacacaacgcgacaacgagatggtttaacttctgctaataaagtcgaagaaggcggtttgagtggtcgtccattatttgaacgtaatttaaaattgattaagtatgcttatcagcaaacaaatggtgaatttttaattataggtacaggcggcgtattcagtactgaagatgcaatcaaaatgatgcgtcacggtgcgtcacttattcaaatttattcatcacttgttattgaaggcccaggtttaactaagaaaatgaacaaaggcatcgcacgttacttaaaagatcatcattttgacaatgtcagtgatattataggactagatgcctaatccaacgtagtcaaataacactttaaaacttgctgaatcgtcttattaaaattatgatataactcaagaagatatatttatcaccatttttcaaaataatggcttaaatatcacatatcattaaatatagcgttttataacggaggcgtttgttatgactaaagaaacagataataaaaaaacagtagcgacttctgacaacaaagacacacagcaacaaaatcaaactgaagaagatgaacgtcaaggtttgaatggttatcgtaaaacagatcttgatttagaaattgagcaagagctacgtgaaatgatgaaaacaggagaaaatgaaacgaaaaacgactacaaaaagtttaaagtgttttcacttatttcaacacttgtcattgtcattttagcaattataagatttgttcataaaatgatttaattagagtgagacattgttttatgtctcaggatccagttattcagtatagctacaatatttacgattatataaataacccgagattttagtatgattcatttcactaaaatctcgggtttctatttgataatttttaatgggatatggcatgtatacgagcctgccttttatctcatttccaatgattaatctggatattgttctaaaaatgctttcgcttctttattaactgttttaaaatcaataccttgttgcatcgctgcaaagacacatccacaataacactgcctaaagatattatagtcattacacatttctatggaacgctcataacctttacttttcttaaaatcacttggcaaatagttcacatcgtatattttttggacatccataccaagttcattgattaattgtgcgttctttttaggtgataacgtgattgcactgccaaaataatcatagccatgttctacagctgctttcgctacaatatccaaacgcatttcaaaacaagcggtacaacgtaagccgccttctttttcatcagctaattctttatccttcaccattttcacaaacttatgcggttcataaggtgcttcaatatacttcacattcgcaccagtcttgcgattaaaatcttccacaaattgttcttgcactttagcacgtcgtaaatattcatttttcggatgaatatttgaattcgcgaaataaattgcaatgtctgcatattgtgttaaaaactctaatgtatatgtactacaaggtgcacaacaactatgcaataagattttaggtctgattgcttctctttcccactgcccgattaatttcttcaacaccttgtcataattaattttttgatttttcattttactgataataggttcagcattaatcatgatttaacctcccacatttaatcattaacttctattatatatgattcatattaaatgtcagtcaaaaaagttagaaattcattttaatgcatttatatttcgaaagtcccttatgtatctaaaagcattttttaaacttgaattttaaaacactaaacaacacatacgtctctgtgtcattttcattttttgtatgtcatatatatgtttacttcatttaaatcaatttcatcttacaatttatcgtgtattttacaaaagattgacttcaattcatcgtaaaagttatacttttgccattttttaatgtaacatggtgttagtaataaaaatactacattgaggtgttttacatgacagcattattcccttatatcgcttttgaaaattcaaaagaagcccttgcatattacgaagaagtatttggtgcaactgacgttaaacgtttagaagttggcgaagaacaagcgtcacattttggtatgactaaggaagaagcgcaagaagcaactatgcatgctgaatttgaagtgcttggcgtaaaagtgctatgttctgattcttttggtcgcgctgacaaaattaataatggcatatcattattaattgattatgatgttaacaataaggaagatgctgataaagttgaagcattctatgagaaaattaaagatcattcttcaattgaaatagaattaccgtttgctgaccaattctggggtggcaaaatgggcgtctttaccgataaatacggtgttcgttggatgttacatggtcaagactatactgcaatccaacaataatgttattgataaagatatcatttaataagcttatgttatttagcaaggcaagccactctcgattcatggcttgccttattttattgtatatttttaattatcgttgctggcccttgattgacaatcgtattaaaatgcattattaagtcaactttgtctatacggtttggatcttctacccaatgtcttatcaaagacaatcccgcacctgaaacataactcatgaaataagaaaatggtataccattaatttgatcattttcatttttataacgttgtaaatgacacataattaagtcatatagtttttcgtgtatatttgaatctttacccatacgaaacatcaattgataaaatgcgatgtctttttctatcatatctattaaaacagtcataatttgatgtatgttatccgtggataacttaactgctccatttaacttctcatcatgaatgaagtctcttatttcctccaactgctggtcctctaatttttcaagcaaatcatatttatcataataatgcgtataaaatgtactacggttaacatcagctaaatctgcaatttgttgcacagtaatctcttctaattggtgttgatgtaaaagttcaataaatgcatttctcattgcaacttgtgattttctaatacgtcgatctatagtcatttatatcaagtcctccccaatgattataaacaattataaacgttatgttcattatcccacaaatctccaacattgatgattggcacacaatgtttacctgtttaatataggtgatacaaacaaacagaaaaaggtgataacaatgaaccaacatttactaggaaatccaaaattaactgtaactcatgtcaatgaagtgaaaaccggtattaaccacatcgttgtcgacagtgttcaatatggaaatcaagaaatgattatggaaaaagatgtcactgtggaaatgcgcgatggcgaaaaattatatattaatattttcagaccaaataaagatggcaaattccctgtagttatgtctgcagatacttacggtaaagataataagcctaaaatcaccaatatgggtgccctttggccaacattaggcgccattccgacatctagttttacacctgaagaatcaccagacccaggattttgggtaccaaacgattatgttgtagttaaagttgcattacgcggtagtgacaaatccaaaggcgtcttatctccatggtcaaaaagagaagcggaagattattacgaagtgattgaatgggcagcaaaacagccatggagtaatggaaatatcggaacaaatggtgtttcttatcttgcggtgactcaatggtgggtcgcatcattaaatccaccacatttaaaagcaatgattccttgggaaggattaaatgatatgtatagagaagtagcctttcacgggggtattcctgatactggcttttatcgtttctggatacaaggtatttttgcgagatggacagataatccaaatatcgaagacatgattcaagcacaacaagaacaccctttgttcgatgatttttggaaacagcgtcaagtgccattatcacaaattaaaacacctctactaacatgtgctagttggtctacacaaggtttgcacaaccgtggctcttttgaaggatttaaacaagctgcatcagaagaaaaatggctatatgtgcatggacgtaaagagtgggaaagttactacgctagagaaaatctcgaacgccaaaaatcattctttgatttttaccttaaagaagaaaataacgattggaaagatacgcctcatgtcatatatgaagttagagatcaattttataaaggcgaattcaaatcagcgtcagcgttccctttacctaacacagaatatacaccattgtatttaaatgctgaaaatcacacattgaatcatgcaaagattagtagcgcgtatgtcgcacaatatgactctgaagataaacgacaagatgtaagttttaaatatacgtttgacaaagatactgagttagttggaaacatgaacttaaaactatgggtaagcactacagactcagacgatatggatttatttgcaggtattaaaaagttagatcgtcgtggtaatgaagttaacttccctgattttaatcatattgaaaatggtcaagtagctactggttggttacgcgtatcacatcgtgaattagatcaagaaaaatccacaatcgcgcaaccttggcataaacatgaaacagaattaaagttgtcacaagatgagattgtacctgttgaaatcgaattgttaccttcaggcacgctatttaaacaaggcgaaacattggaagttgttgtaaaaggtagtgaaattgtaattggtaatagtacccctggcatgaaaacacgttatgaacatgaagaaaccataaataacggcatgcacatgatttatactggtggtaaatatgattcacaattaatcattcctatcgttaattgacatgcaggaattacggtcgattttgattaaaagtgacatagtgatagaagagaaggccacacgcttggaatcttaaaccaaggtgtggccctttttattattgatggctatttaattttataaatcttgtcactaaacttactacaagcaatattaaaccaataaataaagccattattgctgtattactttcgttgtttactcctgtttttggcaattctttcaattgttgcttatgtactgacttgctcttgctatccaaatgaatactttgttgtttagccatttgtttattactttttgtgtgaatatcatttgctttaatacttggatttacagcactattattcgatgttccatttgcgtttttcaactgattaataacatttggatctttcgtgccatctattaaattatctggatgttttagtaaatgtctgcagtcggatactattttagaatcttttgcctttaccgcattattcggcacctcattatcatctttcaactgcttgataacatctggatctttcgtgccatctattaaattatcaagttttttcacacgtgctatgtcactaactggccctggataatttgcatccggttgtctaactggtattaaattgctgttttcattcacaccttcaggtttgttattttcggcgttcgcattatccgtaaaaatcaacactgataaaattgcaacaaataaacttataacttttttcatcttattcatcctttcctattttactaccttaatatcattgctattaaagtaacccatccatctatttttttcgtcgtataaagagtaatatttatacccatttggaatattgtaatagagtttagctgtgtacgctttatcttttttaattaatttattatcacccttttttgtaatttcaatgtttttccaatatatatacttacttttaattactttcactttcttattatatggatgacttctatacttacctatccaataatttatgtaatctaattttaaatcatttattctcacgcctgaattatgattatatctgccgtatgcatgtactccgatgatattgttttttgaatctcttatcgcactaccactttgtcctgaaaatgtgtctaccgtataatacatttcattctcatcaaaactttctaatttccctttacctttatattgtctgttgtctgacttgtctcctggaaatccagaaatttcaatattttcacctttgctaatgtgtgtgttcaaagttaagtaacctgttttatttcctaaattactatttaacttaataattgctatatcttcttttgtaggagcattattaatccaagttttagatacaaaaaacttatgcgaaaaggcctttcctattgtatatgtttgcccatttactccagcatagacatcaatctttttagcccaacccttatcgtctttagaatagacattatgagccgctgtcaatacaatgtccttaccaatcatagtaccggtgcctttatatacacggttatttgaaaacgtcatatttaataatacagtctgcttataaggtctttgtaaaatattattaacaaccgttctttgatctttaccgaaaactcgctcagttaagggcgtactataatcacctacttcataaagctcattttgattacgttcaattgttcctgattcaaaattattatcactaccattttctgaattgacgataggattattatcagctaagacaaaactttcaccataataactagaaacaattactactaacaaaatcaaaaatgatattttaaaaatttttgtcataggcattcctcctttaatctatattatttttatctatttcatataattttattatataattgctatcaattcaatatttttacttcacgaaactaaacaacatgtcattaacttatctcgttaagttaagaattctattttctaccaaataaattctgaatactgttttagataatcaattcgcaaaactatttctttataaatatgtccatcatttaacactgataaaattgcaacgataatacctttacttctattacgctaacccaattggcataaaaataaaaacccctaatggataactacattgttatctactagaggtttctaacttatactattttataacactatcgtattttctttttcatgaatcatttcaataatgacattgtcttcattcattactgctactttaggagcatggtttttaatttcttcttcatttaactgtgcataagtcatgattatgactacatcgcctacttcaacaagtcttgatgctgcaccgttcaaacaaattttaccactacctctttcaccagctattacgtatgtttcaaaacgtgcaccattattattattcacgatggctactttttcatttggcaagatgtctaccgcttccaaaatatctgaatcaatcgtaatactacctacataatttaaatttgactcagtcactcttgctctatgaattttagcattcatcattgttcttatcactttattcagctccaattattatattatctattaaacgcgcttttgaaaatttgacagctaacgagataaatatgcgtccagttatttcgtgttgttctactaattgaggataactataaacagcaacttcttcaatgcgtccacttatatgtgattcaagatattcagtaaccctgtctataattactttactttgacgttcaccgtcttgatacaacgcttgtgctaatagcaaacttttacttaaatgtaccgcttcttgtcgttcttgctccgttaaataaacatttcttgaacttttcgccaaaccatctgcttctcgaacgatatcaataccaataatttcaacggcatgattgaagtcttttaccatttgctcgacaatagccaattgctgggcatcttttttaccaaaataagcataatccggcataacaatattaaatagcttattaactactgttaccaccccatcaaaatgccctggacgcttcgctccttctaacacatcagctaatggacctactttgacatcaatacctaattcacctggatatatatcttctactgcaggatgaaaaacaatgtccgcccctacttctgatactaattctaaatctttatcaatttgtctcggataagcatcgaaatcttcgtttggaccaaattgtaatggattaacaaatacactcacaactgtaatatcatttgtactaactgattcgcgtaccatcgttaaatgtccatcatgtaaggcacccattgttgggataaaaccaatcgttgttcctgagcgtttggctgctttaacaatgtgttgcatctcttttaccgtagtaatcagcttagtcattgttattaacctcattcataattttctttttatacgtatattcttctgatggaaatgcaccagatttaacttcttgatcgtattgttttaaaccatccacaccaacactaaaatcagcaaattgcttcacaaatttcgctttatgttcaacaccataatttaacatatcgtgataaaccaatacttgaccatctgtaccttttcctgcaccaataccaatgactggaattgttaagtgcttgctaatttcctctgctaaatcatttggaattgcttcaagtactaacgcaactgcaccagcttgttctacatttttcgcatctaaaataagttgctccgctgcttctttcgttgcaccttgtaatttataccccataacgccaacactttgaggtgttaatcctaaatgtgcaacaacaggaataccaattgccgttgctttttcaataaatggtgtaatatgcgctccttctgctttaattgcatttgcattcgtctcctgataaagctttagagcatgatttaagtcttgtgtcatagagatgcctactgcaccaatcggcatatcaacaactacaaatgtatttggtgcgcctcttcttactgcacgaccgtgatgaatcatatctgctaacgtcacttgtacggtactttcataacctaatacagtcataccaagtgaatccccaacaagaatcatatcaatacccgctgcttccacttgtttagcacttggaaaatcataagctgttaccatagaaattttagtttgcttttgtttcatatctattaattgacttactgttttcaatgttattcaacctctttttgcagtattattagaaatagtataatgaatcttttatagaaaggaaagaagaagatgttatcagttgcgattatcggcccaggcgctgtcggtacaactattgcctatgaattacaacaatcattgcctcatacaacgcttatcgggagacacgccaaaacaataacatattatactgtaccacatgcacctgcacaagatattgttgtgaaaggttatgaagatgtcacaaacacatttgatgttattattattgcagtcaaaacacatcaacttgatgccgttattcctcatttaacttatcttgcacatgaggacacgctcatcattttagcccaaaatggttatggtcaactcgaacatattccatttaaaaatgtatgccaagcagttgtctatataagtggtcaaaagaaaggcgatgttgttacgcacttcagagattatcaattacgtatacaagataatgcattaactcgacaatttagagatttggtccaagacagtcaaatcgacattgtattagaagcaaatattcaacaagctatttggtataaattgttagttaacttgggcattaattctatcacagcactcgggagacagacagttgcaatcatgcataatcctgaaatacgtatactgtgtagacagttattactagatggttgtcgtgttgcacaggcagaggggttaaacttttcagaacaaactgtcgatactattatgactatatatcaaggttatcccgacgaaatgggaacgagcatgtattacgacattgtgcatcagcaacctcttgaagtcgaagcgattcaaggctttatttatcgacgtgcacgtgaacacaatcttgacaccccatatcttgatactatttatagctttttacgcgcttatcaacaaaatatgtaagcacatatataatataaaaagaccttaacgatgcatttagaaccacctgttcctaatatcgctaaggtcttttaattatattagactattcagcttctctaatttcttctgccacatctttatagtctattttcgctttaacaaacgtctcattatttaccgggaaatgttgttggaatgtttcaaagttttgtatctcaacgacaacgtcatccacttcaaagtcaagaacatgtccaccataagctctttcatcatccgcaaaatgtatatgaaaaccagcagaccctacgccatgaaataattctggtgtaaaaaatccaacaatggcaccacgaatatcttgtcttttttcctcaggttgtctgcgtgctgaatcaatcaaacgtgtatatggcggttgctgagcaggcatcattcgtacatgcatatgtttaaatgtgccataaattttaacagccgaaaataaattctcacttaacatttcatttttaatttgtgcgaatacatcatcttgtgataattgttgcaatggaaatgtcttactcgctttaaaattagtaatcgatgcatacggtactttctcatcgccttttaattctataaattctttatgctcgttagcatgatatgccttcccgtctaaaaatattacttcgccatcagaccctgttaacgttgcaatccctaaattcccatgttctaacaattcattaattgtagctgttccttctagtaagccagccattaacgtacctaatgtaccatgttgatacaagacattcgtcattccaaaaccatctccctatagttattcctcgttgtcatgctctacttcgtgcttaatgcagaactactttcctttatactcaatgacgcctcggcatttcgattcatgtcactaaattttcacgagtcataatactttattcaattattattttacgcaaaagtattgcctctatcaatgcttgctaaaaaaatggatctatcagtgccacatgttactgcaacactaatagatcctcttaccattaatatatttctaattaatacttaaaataggcttagtcttctaataaatatttaattgaatcaaatgtatcttctaatattttaacagatttatcgaacaacgcttgttcttcggcacttaatggcatttcataaattttaactgcgccatgttggttaactaatgttggtacacctaggtaaacgcctttgtgaccaccatattgaccatctaattgtatagaaacatttaagacattattttcattatttaaaatggcttttgaaatgcgcatcaatgctaatgcaattccatagtatgttgaccctttagcttggataatttcataagcagcgtcacgtgtatttacataaatttcttccgctttagcttcgctaccagtttgttcttttaatgtgtcatatactgaaatacctgctacatttgcttgtgaccaaactgcaagttcagtatcaccatgctcaccaataatactagcgtcaacacttgaaggtgcaacaccaagttcttggctaattaaatattgtaaacgtgcactgtccaatacagtacctgaaccgataacacgctctgctggtaaaccagtatattcttttacaaatcttgttaaaatgtcaacagggtttgccgcgattaagaaatatccatcaaagccgctatccataacactcttaacaatgctcttcataatcttagtatttttttcaactaattgtaaacgtgtttcacctggcttttgaggtgcaccagctgtaataacaactaaatctgcatctttacagtcttcgtattcacctgctttcacatcaactggtgaaggactgtggactgtaccatggtttaaatcttgaacatctgcttttactttgtcttttgcaatgtcaataattacaaattcatcagcaacaccttgcgtaaccattgcaaaggcatagcttgatcctacagatccatctccgattaatacaacctttttaccaaatgttttcataattatgtctcctaacctaattgaatttattttacacgtgactacacgtaaaaatatctatactgaaattaaagattaacaattttattttattataatattatgctaccaaattacaaacataaaactgagatgtaagcggagtcaaattacactctatcgccaataaatattgatatctcaagctttagcacgtaatttgaaatttgtgacaatttttagcattctaaaattgcgtaatgacgctatttaaagcctttaacaaactattgagctttctatttttttcattttaaaaaggatggctattcgacttaaatgacttactatataacctcctattttccgccttaccctcatcatatttgatgcatcattttatagtcaaagaattacatttcatacaaactagccaatcagacataaacatgaaattgattttaaaaatataatgtgcaaaattgttagaaaattagcaaaaatagtacttattcatttaatatctgttataatcagttttatcatttaaaaaatctatggatgttatcaagacaagtcattaatacgtaacataaagttgtgatttttcagaatttttagacaaaatattgattatttgtgctatgatataacatattaaaaaacaccgtatagaattgtttatgaatgtttgggaggaaagtttatgggaagttttttcaataaaatagcacgaaaagaggatccggctatctatcaaaataaagatggtcatttaaagcgtacacttcgggtgcgtgatttcttagctttaggtgtaggaacaattgtatcgacatctatctttacgctacctggcattgttgctgcagaacatgcaggaccggccgttgcgttatcattcttactcgctgctattgttgctggtttagttgcatttacttatgcagaaatggctgccgctatgccatttgcaggttcagcctattcttgggtcaatgtattatttggtgaattttttggatgggttgccggttgggctctattagctgaatattttatcgccgtagcctttgttgcatcaggattctcagcgaatttacgcggacttgtgaaaccaattggcatcgaattacctgcagcattatcaaatccatttggtacgaatggcggttttatcgatattattgctgctatcgttattttattaactgcattattactatcacgtggtatgtcagaagcagcacgtatggaaaacattttagttattttaaaagtattagctattattttatttgtcatcgtaggtttaacagcaataaatgttagtaactatgtgccatttattccagaacacaaagtaactgctacaggtgactttggtggatggcaaggcatatatgctggtgtttcaatgattttcttagcgtatatcggtttcgattctatcgcagcaaactcagcagaagcacttgaccctcaaaagacaatgcctagaggtattcttggttctttaagtgttgctatcgtattatttattgctgtagcacttgtgttagttggtatgttccattactcacaatacgcaaacaatgctgaacctgttggttgggctttacgtcaaagtggtcatggtgttgtagcagctattgttcaagctatctctgttatcggtatgtttacagcattaattggtatgatgttagcaggctcacgtttactttattcatttggacgtgacggcttattaccttcatggttaagccatttaaacgacaaacatttacctaatcgcgcactagttatacttactattattggtgttttaattggttctatgttcccattcgcatttttagcacaattaatttcagcaggtacacttgttgcatttatgttcgtttcattagcaatgtatcgtttgagaaagcgtgaaggtaaagatctaccaattcctgcatttaaattacctttatatcctgtgttaccagcaattacatttgttttagtattgctagtattctggggattaggattcgaagcgaaattatacactttaatttggtttattgttggtatcattctatatttaagttatggacttagacattctaagaaaaatgatgtagctgaataccacccaccaaaataaaaaatcaaaaaaatcatttcccatctgattaacatccagatgtggaaatgattttttattttatattaagataatcgctattaccaaccttgtccagatatgtcatattgatctaagttacctgcttccaaagcagtcagtgcatcttctatagtgtttaacgccgtgtctaattgctcatatgttatcaccaatggcggttggaatcgcaacacatttcctgctacagctataataactacgccatgctcaaagcagtaattacaaattttaagtgccgcactggcatcacgtgttttgagttttttgtcggaaacaatatcaataccaatgctcagacctttacctctaacatcgcctacactattgtatttagatacccattgatccattcgtttcctaacatattcccctttttccgcactagcctgaagaagcgactgatcttcaatcatttgaattgtggctaatgcagcttcacaactaactggattagcacctgttgtaaataaatgtgctggtgcttctaaacaattcataatctctttgcgtccaacaattgctgacatgggcataccacctgctaaggattttccgaaagtgattaaatcaggcgtaaaattaaaatgcgagactgaactccatgtacctgttcgcccaaaaccttgttgaatatcatcgacagcgattaaaataccatgttcacgacaaatcttttctaacgcttcaaaataccctggaactggttctaaaagtccaccatcgccttgtatcgtttcaataacaatacatgctacttcgtcagcaggtacatatttcgcaaacatttcttttaagggtgctaaatattcttctactgaattagcttgtggctgctcgtacataccacgatatttatctggaaacggaatatgataaaaaccattcaataacggaccataatgtttgcgcatatttaaactaatagctgacatagacaatgagccaaaagttgaaccatgatatgcattagtgaaactaatgatataaggacgccctgtatatgctctggcaaatttaatgatgccatcatttgcgtctgatccggttaatccgaaggtcactcttttttcaaaatctccaggtgcaagctcacaaagcttcttagctaaacgtaccaacggttcatgatacatatatgctggtgtataatgaataaatttatcaacttgtgcctttatcgcttctgttacttctctaggtgcatgacctacgttttgagaacttgcactcgataacaaatcgatatatgtcttcccctcaatatcaaccaatgttgctccatatccatgatcaatcactaacggataatatttaatacgtcctgatttcgcaaaataatgttcatcctcttgaattaattgatgtgctttactcatatacattcccctcccattgacagtattaatgtgcaagcaaagtggcctctcttaaatcgattataaaatccgatttaaaatcctgctcaaataccgtcatgcctctatgaatactatccaatatactaataaaattcagatttgtaaatatattctgataattaagaattttatatcaatctactttgtttatgcgcataattttgttcgattagggaattgtttactatattccatttgactctgaggtgatacgaatgcgtttaaaagtattgttccatttcattgctgctattttcatatcattcatgttgctatggatgaccatgttgtttgacttaataagcaatcaatcacatttaaaagctttattattgaatttagattttctaattccttctgacaatacaccatatattctagaaataatatgtcacttactaattggtagcgtcatttattttgtatttgtgttgctgtttcatacttctaaaaggctttactatctatgttatatccctttatttttcttatttatagcattgtatccctttttagtatttattgcgcaacgtccaatttttcaatttagtgtgacagaattaatcggttggattattacacatattttctttatgtcattaatggcgttagtcatacctagaataaaataatatttttaattaaactgacaattatttttcacattttatacacttttcaaggtttatgacttgagaaatgttctcatttttatcatactggaggtgtattgaaaagttaaggagtggaaagtatgaataaagagcaattagaaaaaatgaaaaatggaaaaggctttattgccgcattagaccaaagtggtggtagtacaccaaaagcacttaaagaatatggtgtaaacgaagatcaatatagcaatgaagacgaaatgttccaacttgttcacgatatgcgtacacgtgtggtaacttcaccttcattctcaccagataaaattttgggtgctattcttttcgaacaaacaatggatcgcgaagtagaaggcaaatacactgcagattacttagctgataaaggtgttgttccgttcttaaaagtagacaaaggtcttgctgaagagcaaaatggtgttcaattaatgaaaccaatcgacaacttagacagtttattagaccgtgcaaacgaacgtcacatttttggtacaaaaatgcgttctaacattttagaattaaatgagcaaggtatcaaagacgttgttgaacaacaatttgaagttgctaaacaaattattgctaaaggtttagtgccaattatcgaaccagaagttaatattaatgcaaaagacaaagctgaaattgaaaaagtattaaaagctgaacttaaaaaaggtttagatagcttaaatgctgatcaattagtaatgttgaaattaacaattcctactgaaccaaacttatacaaagagttagctgaacatcctaatgttgttcgtgtcgttgtattatcaggtggttacagcagagaaaaagcaaatgaattacttaaagataacgatgaacttatcgcaagtttctcacgtgcattagctagtgatttaagagctgatcaatctaaagaagaattcgataaagctttaggtgatgctgtagaatcaatctacgacgcatctgtaaacaaaaactaatttatacattaaacgtattttttgatataaactactaaaaaggactcatacatgtgctttaagggcattgtgtatgagtcttttttgattaaagttgaatttgccgtatgtattagattacgtaaaaaaatcggacagctgaaaaatctttaagatttctcagttgtccgattttaaatatagctattagaatttagttttcgtagtaacctaattctaagtcttttgaagtttgtttacggatttttctcattaatttttcgtcttcaattaatgattcaccgtatgatggaatcattttcttgattttaggtgcccattcagttttgtattcagggaagttacgttctaatacttctaacgcaactgaaactgaagttgaagcccctggtgattcacctaataatgcaattacagtgtggtcttgtgagttaaccacttctgtaccgaattggatgaatcctttaccgtgttcaggtgtatctttgataacttgtacacgtttaccagcagtgtataattgccaatcttcattacgtgcttctggatagaaagtacgtaagtggttcatacaaccttcttttgtcataatcacttgatcaaatgagtatttaattaaaggtaagtttttaactgctgctgctaataaagttgtaatgttgtatgttttaacagacttgaataaatctaagttagaaccatttttcaagaatttaggtccaacattagcaaatggtccaaataataatgttctttgaccatcaatgtaacgcgtatctaaatgaggtacagtcattggtggtgtaccaggtggctctttaccataaactttggcatcgtgttgttcaataacttgtgggtttgtacaagctaagaattgaccactgatagggaatccacccaaatgtttactttcagggatacctgttttttgtaataatggaatcgctccaccgccagcaccgatgaatacatagtcagttacttgtttgaatttctcaccagttaggcgatttttaacagtaacttcccattgaccatttgataattgttcaaaatcaacaacttcatggttaaattgcactgtagcatttggatgtgcttcaatgcttttagccattttacgtgttaattcaccgaagtttacatctgtaccttcgtcaattttacttgccgccatgataccagggttatcttcacggcctttcatcatcaatggaatccattttttcattacttcgatgtcttcagtatattcgatattatcgaacatagggaaagctttcatcgcttcgtaacgatcttttaagaatttaacattgtttttacctctaacataactgatgtgtggtaatggattgataaattctcttgggttctcgatgctaccgcttttcactaagtgaccccagaattgttttgaaatctcaaactcttcgttaatcactttcgctttttcgatgtcgatagaaccatcaggttgtaaaactgtgtagttcaactcacataatgctgcatgacccgtaccagcattatttctttcgtttgaactttcgattgcaggacgatccaagcgttcgtaaacgtggatattccagtctggctcaatttcttttaacattgaaccaaatgttgtgctaagtacaccggctccaattaaaacgatgtctttactattagacttagccattggtttcacctctccaaaaattgtaaatgtgtatcatcaatatgaaagttacataaaactgacatatttctttaaaatatcaacgccatagataacttcctgttttaattgatacgctgtaacaaaatactatagttagtgcttacatgtatatgttaaagcaagcagtggtaaatgtaaattataattattcattaactttgcaatatattaaatcttttattcatagaagataaatatcaaatcaatcataattatttgacaacaaatagctaacgattgttttaatctacatttggcttatagcattttaaacctatactctattttgatacaatataagtgtaaaatcaatcataaaaaggagattcaatatctgcatccaagaaaaacattacaattacctttaatattgaaaattattttgaatcttgcacttataggtattgtaattatcgttctaacacatactgagtttcaacttaatgccggtgatagtaatgtgtttttattaaactgggatattcgaggtttaacatcttatattttctcattcttaatactggttgcgcttgtttctaaactaattttaatatttataactagacgacaaagaacatcataaataaacaagcagtccagtgcgtatcatcataccttacgcattggactgctttgctatgtttattgattgctatctttttgttgttgccatttttctatttcagaatctcgtagttcaacacgacgaattttacctgagtttgtttttggtaagtcgtcaacgaattcaatctctctcggatatttatatggtgcaacttcatttttaacaaattgttgtagttctttaactaacgtatcatcacccgcagtatggtcctgtaaaataacgaatgctttaacaatatttcctcgtatatcatgaggttttgctactacagcacattctttaacggctggatgattcgttaacgcatcttcaacttcaaaaggcccaatcgtatagcctgaactaataataatgtcatctcgacgtccttcaaaccagaaataaccatcatcatctacatgagctaagtcaccagtgatgtagtatttacctgtttgcgctttcgccgtacgttctggctctttataataccctttgaaaagtgctggcaaatcaagtggtactgcaatattccctttcgtattagcaggtacgctattcccctcatcatctactacagtgaccgaactacctggaatgcctttacccattgatccaatcctctgtggtgtatcttttaaaaagcctataagcaaggtactttcagtctggccatatccatctcttacagttaaattaaagtatttcttgaattgttcaactacttctcgatttagtggctcacctgcagaaacggcactatgtaaatgcgttaagtcataatcatttaagttctgtaatttagccatcatacgatattctgtcggtgtacaacataaaacattaatttgatatttttgaagcaattctaagtatgtttcaggactgaaccttccattaaatacaaaagcagttgcacctgaacctaatacagataagaaaggactccatacccatttttgccaacctggtgctgctgttgcccaaactaagtcatcttcattaatacataaccaatgttttggtgccatttgtaaatgtgcaaatccccatccatgacaatgtgtaacggctttaggattgccagttgtaccagatgtatatgacagaatcgccatatcatcacgcgtcgtatctgccatttctagtttgttacttgcgttttctttttcagcttcaagtgaaatccatccatctttttgaccggcaataacaaatttagttaacgcatcatattctttaattttttcaaattcaactgtgaatggctctagtgcaataactgcatttatttcaccgtgcgtgatacggtattgtaaatctttagttcttagcatttcagaacatggaatgattgcaacacctaattttaaagcagcaatatataattcatacgtcgcaatagatcgtggcatcataatgagtactttatcgcctttagataaaccgtgcgatgctaaaacattacctactttattagactgttcaatgagctgttggtaagtgactgatatatcttcgccttcagtattatgatataaaattgcctttttatctggtatgtggctatatttttcgatttccgaaataatgttatatttttcaggcgcgaatagagctgacttttgcataactaacttcctttcatacatccactttccctgtgatgaacattgtaattttataaatgaattatatatatcatacgcctatctttacagaattttcaattaaatagggttaaataccaaagtcctcggcactacactttgccatgacgtagcattcaaggactttcaaatgattgagggttgatatctcgggctagaccatatcagctaattcaatacgaatattgtatgataattcacgattaattatttttacatctgcacctttcgaagtgccacgatgcttgtgtgtatgcttgtactcagctgaattttgccaatgataaaatgcttgcctattttcccacagcgtaataatgatatagtgtctaccagctgttctaggtcttaaaaaccttaatgctttaaacccatcaacgttttttaaatgcttattacgttgcaaaaatttttgctcgaatgtttcttcttgtccttcgttaatatataaatgatttaacacacataatgaatcatttgataaatcatttatcgcttctagcacatcgtaatatgcagtgtcattatttttttgtattgtgagacaatcatccagttcttctattaaataacttctatattcatcataaatgttcataataaatgccttcatttcatttatatttttggtcatattactttatatctatgactaattcattcccgtatttattaattacaatcatagtttggcttctttttaaaagataagactttgtaaaaagtattaatatttcatgcaaatggggacaggagtcgcccactatttttgtgtcttcaatttcatgatcattatttaacattagtcatgaaaatagccgacaacttcatctgtgaaatcaccggccttttattttagctaactttatttctgattttacgattttaattgatcatacagagaaagtgatctttttacaatttctaaaaactcatgatctatattggacatttgatgaaaataagacaaaatgttttctgttagcttctcttgttttgggaatgaatcatcttctttaatccaaatcgctaattcgcctaatggtgttttatcatctttaaatgtttgtatatattcgtaaaagctcatagtattccttctctcaatttacttatataaatcctaccacgaaagctttcaagaaaacacaattaaatgtctatttagtgaactttttaaggttgtacactcttttaatgtctgccaattaggtcaattaatcatcacaatgtacaattaactctattttcagttcacttactcacacaccgtttttaaacaacacattaacttctcatttagataaaacgcaaaaaagtctggcaccaatacaatagatgccagactaagagtctactatataaatttatttagcgtatggttttacttcgattgcaccttcattttcatcatgaacaccatgcttataataatcaatatattgtggctctaaaggctttctgccacgtataatgtctgctgctttttcagctaacattaaaacaggtgcgtgtatattgccatttgtcgtacgtggcatagcggatgcatcaactacacgtaaattttccataccgtggactttcattgttaacgggtcaactactgccattggatctgaagcaggacccattttagcactacaagatgggtgtaatgctgtttcaccatctctacgaacccaatcaagaatttcttcgtctgtttgcacttctggtcctggtgaaatttctccaccattgaatggatccattgctttttgagataagatatttcttgctacacgaattgcttctacccattcttttttatcttcttctgttgataaataattaaagcggatacttggtttttcgaatggatctttagatttgattttcaagctaccacgagagtttgaatacattggtcctacgtgaacttgataaccatgtgcgaccgctgccttttgaccatcatatcttacagctattggtaagaaatggaacattaagttaggataatcaacttcgttatttgaacgtacaaatccgccaccttcaaaatggttagatgctgctgcacctgtacgtgtgaaaatccattgtaaaccaataaatggcatgcgcttgatatctaagcttggctgtaatgatacaggttccttacatttatgttgaatgtatacctctaagtgatcttcaaagttttcacccacacctggtaaatgaacacgtggctcaatgccttttgattttaggaactctgaatcaccgataccagataattgtagtaattgtggcgtattgaatgccccaccagacaaaatgacttcattagcatcgatggtatgtagtttgccatttttcttatacgtaacaccagttgctcttctaccttcataatgaatttcagttacaaaggcacgtgtttcaacggttaagtttttacgcttcatcgctggatgtaaatatgctcttgaagctgacattcggcgaccacgatgtacttgactatcgaacggtccaaaaccttcttgtctaaatccattcacatcaggtgttttatgataacctgcttcaacacctgcatcaaagaatgactggaataaaggattcgttgctggccctcgttttaacttaattggtccatcatggcctctaaatttatcataaggcgctgcaccgtatgttttttctaattttttaaaatacggtaaacagtgcgcaaaatcccaagtttccataccttctggttctgcccagccttcatagtccattggattaccacgttgataaatcatgccattaatcgaacttgatccacctaaaactttacctcgggcatgtgctactttacgaccgcccatatgtggttcttcatctgttgaataaatccaatcgtaaaatttattgcctgaagggaacattaacgcagcaggcatttggataaataaatcccaaaaataatcactgcgacccgcttctaatactaagacttctttatctttatcttcactcagacgattacctagtacagaacctgcactgcctcctccaatgatgacataatcatatgatttatttttgttactcatcgttatgacctccaaagtttgttgtatttcaaagtgagtattgcatgaaatatttgttagtggctgattggttatcgttgaattgctaaacttggctaaccaaaacactcgattttccttttacgattgttactaacagtcatgaaataatctatgattcattttgcgtttagtccaaattatcaatcaacatttcgccacttatacaaaacaaagtgagtgtcttgtgttcttacaatggcactcaccttatctaatttttatttgctaaaccaattcactaattgtggatttgtatttgttaaaatgtgttttgaaacaaggtactcttctaagccttctttgcctaattctctaccgatacctgattgtttgtatccaccccatggcgcttgtgcaaaatatggatggaaatcattaatccacaccgttccaagtttcaacttgttagcaacgcgttgtgcttttccaatatctttagaaaatacagcacctgctaaaccatatatagaatcattcgctaattgaatcgcttcttgttcagtttcaaagccttctacagtaacgacaggtccgaaaacctcttcttgtacaatacgcattgacgtatcacaatttgtaatgactgttggctcgaagaatagaccatcttttaaatcgtctctatctggacgtttaccaccaacagcaattgttgcgccttctgctttagctacatccatataagattcgatcttattacgatgttctgttgaaatcactggtcccatttcagtatcagcatcaaaaccattacctaatttgatttttttcacgcgatcaataagtgcttgctcaaatttgtctttaatactgttttgtactaatattcttgatcctgctgaacaaacttgacctgcatgaaaatatccaccatttaacgcttggtctactgccaattcaaaatcagcatcatcaaagataatgtttggatttttaccgccaagttccaaggcaatattcgtaacattattagcagcatttttcataatatgcttaccagtctcaatgccacctgtaaatgatacaaggtcaacctctttatgacctgacattacgtcaccaacttcagaacctgcacctagaataagattaattgttcctttagggaaaccaacttcttccattaattcaaaaacacgtattgttgttaatggtgtaatttcacttggtttcataactagtgaacaacccgtagcaagcgctggcgcaattttccatgatgcttgtaataacggataattccaaggtgtaatttgtgtaactacacctactggttctttaacaattttgctttctgtatctggaattggtgaatcaatcatttcgccaccatctttatctgctaatccagcaaaatacataaacacattatgaatatcatccatatctgcatatgattcttctaacgtttttccagtatctaatgtttctaatcgtgctaacgcttcgcgatgttctttgatcttgtccgcgatggcacgtacttttttacctcttttttcagcagtttcttgcgaccattcaccagactcaaacgcacgtcttgcagctaagattgcacgttctgcatcctcttttgtcccttcagaaaccgtaaatatcacttcttgattgtaaggattgataatatctcttgtatttttattcgtgctttcaacccactcaccatcaatatattgacgctgagataaatgttttaaaagttccattcaacaacctccgttaagtttgttaaatttttatttaacgaattttacaaacttatgttagcatagaaatgaaaaatgtgtcaatttacaaaacaactcaagaattaagttttgtaagttcgttagatttttatttaacgaaacatttaactttaatgctttaaatatttttaatgtctttttttagaaaaggttttataatgtattagtatttattttaacgtgaacaaaatgatgtacggaggtgcaatgatgactcgttctcagaacaaacagcaacaattagaacaagcaaaagatattgtaattaattcaattggacagacaatggatttgtatggcactaatagaagtgtaggaaacttatatggcactatggtgtttgaaggcagtatgacgcttgatgaaatgcgtcatcaattgcaaatgagcaaaccaagtatgagtgctggcgttaagaaattgcaggaatttgatattgttaaacaacaatttacgagaggaagccgcaaacaacattttatcgccgagaaagactttttcatctttttccgaaactttttcactaaaaaatttcagcgtgaaattgacatcaatgtcgaagcagtaaaagatgctcaagctattatcaatccattacttgaaagcagtgatttaactgaagctgaaacacaagaggcacaaaaaattaaagctcagcttgatcatacacatgtttattacgaatggttagaacagttaaccgaagcgattgaaagcggtgaaattttcaaatatttcccaattccagaacagccttctgattctgaaaattaaaattagcctcggacagcggcaatgatgattatgcatgatgaaaacaatacaataggtccacgaaataaacggtaatttctatctcaataaatagaaattaccgtttttgttttatatgacaatcaattatatacttataaaattcaaaatcttatgcatcattatttgaattataaattatcgtcttgttcttcttctgatacttgaacgattcgcaatgaacgacgttcaacttcttttaatttttcagcacgcgtttcaagtttaattctatcgcgccctaaaatgattaaaaatgatatcatcatgaaaataaaaataacaattaatggcacacttgccagtattgaagcagttttcaatacttctaatgcacgttcgccaccaactagcatcaatgaaaatggcaataagcacaatgcaaatgcccagaataaacgattggcacgtaatggttcgcctaccacttttttctgagatgctgccgctaaaatatatgaacccgaatcaaatgttgttgctaagaataagaaagcagatactaagaatagtacaatcatcaatgatgggaatggtaaatgatgcaccacttcaataatggttgcctctgtaccatgtgtatttaaatattgtgttacattaaactgtccagaaatttgtaaatacacagcatagttaccaaaaataccaaagaataatacgcatccaagcgttccataaataattgttcctagcacgacttctttaaggcgtctaccttttgaaattctagcgataaataaaccgataaatggcgcatatactaaccaccatgaccagtagaatattgtccagtcttgtgggaaattcgtttcttttcgacctttaataccaccgaatggttctaaccatgttgccatatggaaaaaatctctcaacatatttccgaaccctgtcactgtcgtttccataataaaaacagtcggtccaataataaatataaaggctaaaagtacaaatgatagccaaacgttgatatcacttaacttttgaataccttttttcaatcctgtatatgaactaatagcaaatatgaccgtaatcgttaataaaatagccgaacgtaaaatcatatttttaccatctaaaccagttaatctttctatgcctgcagaaattaatggcacacctaacgctagtgatgttgccgcaccacctagcaatccaaagataaataagatatctacaactttacctacaaatttatctgtttgaccttttaaaatcggacgacaagcttgactaattttatacaccggttgttttttaacaaacactaaataaccaattggtaatgctggtaaaacgtaaatagcccaagcaattggtccccagtggaacataccatattgcgtcgcatattggagtgcttcatcactcatacttttcgcgccatttggtggaacttgatagtaaaaagcccattcaataacgccccagtataaaatatcagagcctatgcctgcacaaaacagcattgccgcccatgtaaatgtattaaattctggtttatcacttgctttaccaagtgtgacattaccatatttaccaaatgcgatatacattacaaagcaaaaaatcgccagccccataaataaatatatcgaaccaattgaatcagaaatggcactattaataccagtgatgatatcttcacttgcttttggaaaagccatcataggtataactgcaaaaagaagtacagctactgtccctataaaggtcgtccagtccataactttctcttttttcaattgtgctccccctaattattaattttatgaatcctgtttcgatttatctcaaaatgtaataattatattgattcacaaaattgacaataactaatatttaataataatgcaaatttcatacaatttgaaacttggcaattattgaatatttatataatttttctcgtaataaacaaaactttaatagcgctaaaacagctgtgttaagttatgatttaacgaatttaacaaattttactaggacggcatttaagaatatttatacgtttttaacgaatatttatttattgtaaaacgctaccaaaaagttagacttccttcccactaaagtaccacttttttctttcaacttttttaaaaaacggatatgcaacttttagtattggtatcaaaatgattgttaggtcatattctatcaatatatttttctaaagaattgcttttattaactttcaattatgtacctaacctaaaaagaagccaaggcaacgaatgttaccttgacttctaatacatattcaactaactatatattcaatcatacgcgcatgcgagagtgattgttgtacatctataatgcgttgatttaaagaacctttatatggtaaatcaggtttgaataagtgttgtataaatagaccatctactaaaacgtcaatgtatgataataactctcgacgttctgtacaatcatttgctaaatattcatataaaaatccagtccatacccaaattgtctttgtatttccaaaacgtgctcgaaatgctttgacaagatttaatgtaatatccaaattacaaaatggttcgccacctaatagacttagcccagatatataatcatgatcgcaatcatctaatatttctgctaatatttcatcagtgtatttctcgccatatctgaacttttgtgaggctttgttataacatccaacacaattaaatggacatcctgatacataaacactgcatcttactccttcaccgtcaacaaagctatttgattctattttagcaatataaccttgtccttgtttaatgtctaaaagtgtcattctttaggcgctttcatatgttttactcgtgcgcaaatttctttatgacggcctttaattactggacgttgaactggattgcctaagtaaccacatgttcgtttaacgacatcaactgttttaggattatcattgccacagttcgggcatttaaatcctttttcagttgcttcaaaatctccatcgtaatcacattcataacaatgatcaatcggaatatttgtacctaagtaaccaactttgtcataagagtagtcccataccgcttctagtgctttcaaattgtgttgcaatttcggatactcacaatagtgaatgaaaccaccactcgcataataaggataatctttttcaaaatctaacttttcaaaaggtgtaacatctttacgtacatcataatggaaagagttttgataatatcctttatctgtaatgtctttaatatctccaaatctctcttggtctaaacgacaaaaacgatccgttagcgattcactcggcgtactgtaaatactgaaccaaatgtcatataattctgtccatttcgtttgataacgtttcatttctttaagaatttcaagcgtaaatgcttttgcttcttgagatgtttcccagtctggaccatagaaaacagtagctgtttcatacaaccctatatagcccattgaaatcgttgcacgtttatttttaaataactcagcaacatcatctgtttcttttaatttatagttaaaagcgccacttttatataaaattggtgcgttattcggtacagcatctttcaaacgatttatacgataaagtaatgcatcatgtaacacatcgatacgttcataaaagatttcccagaatttcgtcatattaccggcagattctaatgccattctaggtaaattaagtgtaacaacaccaagattacaacgaccattattttcaaaatgaccttccgcatctttccaacttggtaaaaatgaacgacaacccattggcgctttgaaatcacctaatatttctacgagtttgtcataatttaaaatatctggatacatacgtttcgttgaacactttaatgctagttgtttaatgtcatagttcggatcttgcggactaaagttggttccttttttaattgaaaatacaagttttgggaaaatcgctgtcgtgcggtcttttcctaagcctttgatacgagtatttaagatagcttgttgaattttgcgacttaaatgatctgtacctaagccgaatcctaatgttacaaaaggtgtctgtccattagatgtatataaggtattaatttcatattctagactttcaatcgcatcattgatgtctttagtgacttgttgatcaacataacgatcaatttcagattctttgacaaattgctttgcgatatttctatgttgttcttcattatgtcgtgcatatgtactaagtaattcgtcaacgcggtcaaccgtacagccaccatattgactgctggaaacattggctataatttgtacaagctgcgctgatgcagtttgtattgattttggtgaagttacattcgcgttgcctatttcaaatccattatgtagcatatttttagcatctattaaacaacagtttgttaacggttggaatggatgataatctaagtcgtgaaaatgtatgtcccctctttgatgtgcatctgcaacgtgctttggtaataaataatttaatgcgtaagatttagaaacgatacctgctgttaaatctctcattgttgaaaatgtatcactatctttgttggcattttcgttaacaatagcaggatctttagaaatcaaacccgttaatgcttcttcgatttgattcattttaccccttcttcctatatattgtgtctactcattacgttataccactatatatagtattttcaaatttttattagtctgttaactaaaacgtcacaaagttattaacatttagtgaaattcatatttctacacaattatttcattaatttttaaaattgttctgtcatttcgacatgtttatgcaacttaaatcgtcacaatgcccatcaacattgcaattactaacataacgatggcgaatccccaaatccaaaagaatgcatacttaatatacgtgcccatgtttgcctctgctaaaccaattgccaaccataaggctggtgaaaatgggctgacaaatgtacctataatattccctatgaccattgaataagctgttgatacagacggtacaccaaattgccctgctgtttgttcgacaatcggtaacacagcaaaataataagcgtctgtgctagttagtaaatctaatggtacgccaagtaaacctacaataatatgcaagtatggtcctacttctgcaggaatcactttgattaaattggtcgcaatcgctttaagcataccggtttcatttagtacacctaaaaacatacctgctgcaataatcactgcagccatcattaatgcattcggcgcatgcgctcttaatcgctccatttgttcatccactgatttaaaattaataacaagcgccaatgagacacctatcatgaatgcaaattcaggtggcgcaatatttattaacatcgatagaataacagctaaagttaaagctgtattcacccattttatccatgattttgttcttgcacgtccttttacaggaaaccttacatcttgatctcgttcatatacttcaactaatttatgtacatctatatcttgtgtttgcggtaattcatttctctctattgcttttttgatacgtttctgttctttaaatccaagatataccgcaaacaacataacaagaatgaaacctattatttgaataggtattaatccataccataattcattgacacttttggcttttaacactgcagctacacgagccattggacctccccaaggtaccatgttcataatcgccgcgcttaatgctaatagtaaaatcaataaatatttattcatatttaacgctttatataaaggtaataatgcaggaatagaaagcaaaaatgttaccgcaccggccccatctaattgggctattgtgccaattaaagctgtcattgcacagacaatgacgacattgcctcgtgtcattaatattaagcgtttgacaagcggcttgaataaaccactatcgttcatgatgccaaagaaaataatggcaaagataaacataataacaacgttgatgacttgatctaaccctttagcaaaaaatccaaccaaatctgtcacactatatcctaaaatcattgcccctaagcaaggtatgattgtcatacctacaactggatttatctttttggcaatgagtaaacctacaattgaaataataataatgagccccattactgttaaccacatattatcactattcatattattttctccctccacttttaatacaatttacataatccccctctttaacttaaatattataattaatataattttttatatttaagttatctcattttatcaaaaaaatcttttttgcgtaactatcaatagtgaagtttgattttcctacttgataacatggcatgactaatccttgtatatcctgtcctgtatttcattttgatctatcatttttattattgctttctattgcacaaaaaatctggctaaaggtcgctatgatagtaacgacttcaaccagatttcaatttatccatctattttattaagtttgttctacgtatctttttctctattgtaatattcatatttaaaacgcatatcattatcgcttaaatccttcattattagactattcacaaagccacccatgtcttaatttcaatgattaagcgttaaagttaaaataagaagacttaccttagacggttagacggtccgctattattatcttacatccaaccacgctaaaaattgagcttgtttgtcatgatttaaatattcttgtgacacaatttgtgacagtaactgttgcttttcgttatatgttatatcaagtacttttattttctgtcggcaagtatataaaaagtcgatatacgaactgtatgatggtggatataacgcctcaagctctgccataattgattttgtcaacttaggactcgcaccatcagttgatacactgatagttagcttgtcgcggtgtagtgcacttggaaatacaacattgccatttgatgcatctccaacattattaaaaagggcatgctcaggtaaggcttgttttaccgcttcattgacacgtggctcattggttgctgcaataactagatacgcgtctacaatatcgcttggttcaaattctttttctttccatatgacgacaccgttatctaccatattttgaagtttttcagtgattgtcggactgatgaccgtcatatgttcaacgtattgatttaatgtttgtgcccgacgacttgcaacgacgcctccaccaactatgacgacatttttatttgttaaatctatcattaatggcatattcatgttgagcaacatcctttatatctttttacatcattacaccttaaaatatttaacaccaatcgctaataaacatcacgttgatagcgttgttgttgtttcatttgtcgcaataataactctgcttcttcttgagaaatatgacgttcttttaccaatacatctttaatggcttgatggacatctttcgccatacatttttcatcgccacaaatatagattgctgcgccttgctcaatccattcattgaaacgttcactttcttccattatacgatgctgtacatattctttgtgttcttggtctcttgaaaatgctaaatctacgcgtgttaagtttccattttcaagccattcttctatttcttcttcatataaaaagtcagaactacggtgttgatcaccaaagaacaaccatgtttttccagtcataccaagttcttcacgttcttgtaaatatgctctaaaaggagcaattccagtacctggtccaatcataataaccggtatatcttgcttcatcggaaatttgaagttcggatttttcttcaaataaattggtactatatcgcctggtttaattcgctcagcaaaatgaaccgagcatacaccttttctctcacgtccatgtgcttgataacgaaccgtaccaacggtaatatgcacttcatctggcgttgccataaaactactagaaatcgaatactctcttggtggtaattttctaaggatttgatacatattctcaggttgtaattctatagttggaaaatctgttattaaatctataaagtcccgatttataacatattcacgcgcccatgactcatcttgaatacgttcagataattcttcattgtcaaaatagatatctgcatttttcaataatggcaatgttaatttagtaaattcaaaatgtgatgttagtgcttcaacaataggaactgtatcaccacgatcattaattggcaccggagattgcggatcccaacctaacatggatattagtttttcaaccaattcagggtcgttttgcggtaatgctactatacaatctcctggttcatatgattcactaaaatcatcaagtaaaaattctatatgtcgtgtttctttatttgaatcggtaccatttaaattgatattcgctaaaacttctgcttggtatggatttaatttagaatatttcttttctttggcagacttaattgattcacttatcaccgattcactttgaataccttctgatgtagtatcaatcatattaatgatgtctgccatccacttttctgcgtcttcttcataatcaatatcacaatctacacgcttacatatacgctcagcgcctagattttctagtaaagcatctacatctttaccagcttgacagaaaaattcatatgtttgatcacctaaagctagtactgaatatctcacatgatttaaattaggtgcgttatcgtcttctaaaaattcaaagaaatcccatgcattatcaggcggttctccttcaccatgagtagacgtaataataaataaatcttctaactgtgcgatgtttgtcgtatcatattcatccattgacatcaaaacaacttgatgtccgatatcacttaaacgttctgaaaaaatttcagctaaacgcatggcattacctgattcagaaccatatagcactgtaacatgccgctgattagcttcgatatgtggctctttattttgtaacatatacgttgttgaagttgcttgttcttctgatatttgtgattgttgccacacttctgtctctaattgttgttgattactatcacttgtcgtatcgttactattagctagtaaaaaaccactaagccactgttgttggctctctgttaatgtttgcagcagattgttaatctctgtgacttgtttttctgtaaatggactattagatgtatttaatttcaaatgtttcacctcaataaacttgaaatagatgattgactctttttttatcgatagtttagtcaattttttaatatgtatggtataaattaaaacaaacttgagttgtgtctgatagttatacttgcaaatatttacaactttcatgttgcttgaatgacattatcagtaattcagacaaaactttgattatgtcgtgtcagttattaatgcatacagtaatgcatcgttgttattttttatttatttactatttattatgtaccaaatcagcctttcagtaaaataggtcaaattactgattttctaaatataaaatgcctcctaatgacatactattagtacatcattaagaggctcttgtgttatttgcatactaagcgctcaattttaaatttaagatgaagattcttgcaataatatttctatatttgtcgatatatccaatggatcttccattggcaagaatcgatttacaacattgccttgtcgatcgattataaattttgtgaaattccattttattggggacccaaagattcctggttgttcattctttaaatgcgtaaataacggatgttcatcgttcccgttcacagatattttagctagcactggaaatgtaacaccaaatttctcacgactaattttcaagatttcttcattagaacctggttgtcgattgtcaaaattattattcggaaaactcaacactacaaacccacgatccttatatttttgaaacaaagtctctagttttttcaattgttcgctatatatacattctgttgcagtattaacaactaaaatcactttacctctaaatgcttctaatttataagttaagcctttataatcacttacttcgatatcatacacatttctattattcataagacacccctacacagccttttttatattgaatatattctttttagaatgttctgataaaataagtgcgcgtttacaccgcgaacatacattatatagcgtgatacatttttcgagcacacgataaataatgttcgagtttatgttgttgctcaacctatccgatttaccgtcttttttcacctgtcttactttattaaaataatcacattgtatagctgtattagtccagctacaatatctttcgttataacccctcattataatcatccttattttctatttttaaaaagacaattagaccgctctttaaactatagattaatacttaagttaaactcatacatactgataccatacgttagatctaacaatttaaaattcgttataactatggattaaagagctgcccaactcatataatccttaaaaacttcacatgtgattgtttattaagccctcctttatcttattaaatatccttataacccttttaaaattaaactgacacactcatacattgttacacgcgacgataaacgtcatattattgcatatcattaaaacaagtcactttgtatcgtgtgcgaccgaatacatattaaatcatcaataatgattattcaattattaaaaataaaaacgaacattctatatagagtttctacttattgttttttcagcattgtctacattacttaacattcgtgtttataagtaatattgaccgccaatatttagacactttataagtatgccattcatcatttttaatcatattatttttcttattgatatttctattcatatatttctgattgtatatttagatataataatttgttattggaaaatatatgaaacaaatttgactcatctttttcaatatctaaatgacacgatgcatgatttttgaattttgtaattaacttccttttaaattagactgaattgtgacaattttcaaacattttaatgtgtaaatcattggcaaaatatacgaattgcatttaaatcgtcaatttacatatatttttgcgtagtaatcaatcgttatcattgttatttatcgttacattatttcgagtatcagtatgtatttcgggcttcgtttgataacgacatttctttgtgacatcgcttcatcagtgtaacaacaaatacaatgatttcgtgatgttagttacccattttatgtgttgcataaaatatgttgttataaaacattttaaatcattttatataaacaatctatatatttttggtatttccaaaatatcacttgttatattaaaaaccgacaagacattttatcttatcggttcaaatttggtattgttatttgtaatgtttttaggtttctttttaatataatatatttcagtgaaaatacatgattgattgtgatttcactgaaacatggttaattacgttgttgatgaataactttagcataaatataggaagttattttgtacatcgccatatatagaaacgaaattataatgacagctagtacgtaacttgttaaaaatatatgatggttattaatacctatcatatttagtaacgtatatacaatgttactagaaattaatgtgtgaatcagtgctactgttattggtattgcgaacaagaaagtcatttgatttcgtgttatctttgctattcttccattatctaaaccaagttttttcataatgtcataattgtgctgatttgcataggcttctgagacttgtttatagtacatcattagaaatattccaatgacaagtacaattgatactacgccacctacaaatattagtccacctgtcaaacgatcccaaaccattagcatttctgatttagaatttattgacgcatcgtattttttcgatagcttttgtatttgtgatgttgttaatttcgtctttccaaatacattaaagtttatcgatattgtcgaatccttttgttcatgtgcataaaatccttttactttttgtaattgattgttatctttaacaattaaaaccatactatcttgaatcatcatcaaatttaacgcatgtgcgtcaagttgtttcactttaaagacttcattattaagaccgaccttagactgctttttaaaaataggtacattcgtaatcatacctatactttgattgtctaagtgtaatttgttttggtgatatcgattataatcttgtgcagtaaaagctgtaatcattactgattgtcttgaaaatatcgcgccttcattaccaatgaagtctattggaatatcatcactagcctgttttaacttgtaataagcacgattcttttctaaagaagctctaaataatgtcgtttcatatactttgaagtcttttgcattaaccgaaccctgtatatcacgtttaatattctcaattgtttgttgacgttctatttgtgacttagaattgtcgctaaatgacaaatcataatcattcgtaatcaatttcgtaatggtatgattcatatcacgataggttgttaatgtcattgtgagcgttacaatcaaaaatgtacacagcaaagtgattgttgcaagactgactgcattcattttaagacgtacacgcatcccaactaccacaaaaaaataccgtggatgatagtaaacttttgatacctgctgcaatatactaataattatttcacttatacctacaaaaaatgcataagtaccgataataactaatcctatgacaatccatattttaaaaaaggcaccaaacgtcgtatcttgttgtaatgcaataaagtaacctaaatatagtgctgcgcttcctataacaattaaaacgtaacgcaaccatcgtgatatgacactagaatcggaacgatgttgataagttatcggccgttgaaaattaatactgaacaagttgaatataagtagcatgcccattaatacagcaatgataatcaaagtaataaacatcgctacagagtcaaatggataataccttaacgtcgcaacttcactgcccattattttctgtataaacaagaaaaatatcgcaccaagtaagtatccgccggcaatactaacgactgaaattatcacaaattgtaagatagtttccatcactacaattaaacgcatacttttcttggtcatgcccaatgtcataaaaatgctaaactcttttcgtctttgtgacatcataaagtgatttgcatagaaaataaaaataaaagttaaaagcgccataaaaaaattagctatgataataaatggtactaggaagtcattcttctgttttatgtagctatttaacccaattgacacaagcgtatattcaatcatgaatagtacacttaccgctaaaatgaatggaatgattacaagtcgctgcgtaataaattgacgtcgcactatgtgccataacaatcttaacttcatatattgacacttcctccattcacaagtgctaagctatctgttattcgttgttgaaaagctaattgactttcttcaccacgatatatttcatgatatagacgcccatctttaataaaaatgactcgctctgcataagacgcatcgatatttgaatgagttaccattaaaattgtctgttccaattgatgaatctcttgaaataacatcatcaatgcctttgacgtttttgaatcaagtgcacctgtaggttcatcggctagtaaaatcgtcggcttagtaactaatgcacgtgcaatggcaatgcgttgcttctgacccccagagatttcagaaggatacttgtttaagaatccctctaaatgtaattgtactgccaactgatgtaccctttgttctatatcttttcgtttagcaccagctaaaattaatggcatcattatattttctttattcgtcattgttggtaaaagattaaaatcttgaaaaacaaaacctaccatttgttgacgatacaatgctttacttttatttttcatattatttaaatgtgcgccatccacaataatgtcaccttcagttagtccatcaaaagaagcaattaaatttagtagtgtagacttccctgacccagactcacccataattgcaacaaattcaccagctccaactgataaattcatttgattaagtgctgtcgtagcattcaaacctttaccataaaccttttttacatgtttcacttctagcaacatggcatgcacctcatttctttgttagttctatattaaaacaaaaaaatactaataacatttaaattagtaaaaaaatgttactagtatacttacaatattgaaagtttttattcatctggaaattgaatcgtaaatgttgtaccctcattttgtttagatacgactgaaacaggatggtttgtgtgtgttgaaatttgttttacgataaataaaccaatcccacttgagttactttggcgctggccattataacctgaatagcccttatcaaatattttaggcaagtccgcttcactaataccgataccattatcttttacgtgtaattgattggattgctcatcaaattcaatccatatatctttacctctcgcatacttaagtgcattatttattaattgttctatcattaaagaggtccatctaacgtcagttaatacttcgtgatgacaaggttcataatggatttttgttttttgatcaataaactgtattgaatatttcataataattgggcgaatgatattattaatcgaaattttagtgacagaaatatcagaagtttcatttaataactttaaataactaagtgctaaacttgtatagttatcaatttgaataacctcttgacgaacacgattaacaacattaggctcatctctttcaagtaacagttgtgctgcagtaatgggtgttttcatttgatgtacccatgttaaaaagtagctctctacatcatttttatattcaatttgttcatttttaagctgatacaacgcagtttctaagttttcaatttgttgttgttggcttatagtttttacaaaacttaaatatttaatacctatgaatatgagtaataataataaaataacgccaagtgctagtaaatatgcttctaatggcaaatgatacaggtaaaacattaagccaaataaagcaaaaataactatgactattgctatttcctgagtaatacttttaagaaaggtcattgcattcaccctatactttatatccgacatttttctttgtaatgataaaatcattaacgccaatagtatttaattttttacgcaggcgcgtcatgttaacagctaatgtgttatcatctatgaagttttctgattcccaacatttttcaattaaagcagttctacttacatatttatcttcattttgaaataataactttaatatttgtaattcagtcaaagatagctgtatgttttgttcttgatacacgacttttgcttcatctaatattaatgtacaacctttaaccgtcaatgaatcattagctactgacaagtcataagttcgtctcaataatgcttgaattttggcaatcgttaatgacaagttaaatggcttttcgataaaatcatctccccccatttgtattgccataatttggtccatattatcaatacgggaactaataaatataattggcacattagatgtttttcggatttcttgacaccaatgaaaaccatttaacgttggcaaattaatatctagcaatacaagctgaggttgatgttggttaaagatagacagtatatcatcaaattgttcaacgacaataacaccgtaattccattttttaagttcagatgctaaactttctgctataacaaaatcatcttcaacaattaatattttcatctataatcttcttccttcaattgaattatcctttgttatctttttgttctttagtctgctgcaatgacggctcttgatttgaactttccgtgtcatttgtattttgatttagtgtatttgctttttctttctcgagttgctttttcttcgtacgtttacgctcctctaaaatagacaacactataaagaatatgattaataatggagataacattactagtatcatttttccacctcaaattatatttaattctatattttcacacgcttctattctaacgctttctataacaaattgtcatatatattcattttttgttattctaaatcactctgtttacatatttttaactaaaactacataattgctcaaaattcctcttttacactgaagacatagtcatatactcaggaggatgtattatgttatcagttaaaaaagccacaaaatttgcagttgctaaccttattatcgtgtcaacagttttcagttctgtcacacctgcaattgcgcaatccgataaaagttctaaagatgaaagtttcgcagttggtaatactaaaaatccaaaaaatgttatctttttagttggcgatggcatgggtccatcatttaacacagcttatcgttattataaaaatgattcgcatgccaaagaaatgacccctactgcttttgattcatatttaaaaggcacaaatcgtacatattcaaatgacccaaaacagaatattactgattctgcagctggcggaacagcctttagttctggccataagacatataatggtgccatcggtgttgacagtaacaagcagaaagtaaagacagtgcttgaacgtgcaaaagaaaaaggtaagtcgactggtcttgtttcaacagctgaattaacagatgcaacaccagcagcatatgctgcacacgtgacttctagagatgataaaaacgaaatcgctaaacaattttataaagataaaatcaacggaaagcataaagttgatgttttattaggcggcggcgctaaatatttcggtaaaagtaatggcaatttagataaaaaattcaaaaaagatggttacgaccttgccacgaacagtaaggatttatcaaaatctgataaagataaagttcttggtttgtttgcagataaaaatatgccacttgcaatagatgcttctaaagacgaaccatcattagctgatatgcaacaaagtgcacttagtaagcttgagcgtaataaaaaaggtttctttttaatggtcgaaggtgcttctatagataaatcagcgcattccaacgatattacaggcgttatgtctgaaatggaaggttttgaaaaagcattcgatgacgccattcaatatgctaagaaacataaagatacacttgtcgttgcaacagcagatcactctactggtggtctaacaattggtaaagataaaggatacgaatggaatcctcaaccgattaaatcgatgaaacactctggatcatatatgacagaaaaaatggctaaaggtgaagaccctgaaaaagttattaatgaaggttatggctttgaattttcacaagatgatatgaaaaaggttaaaaaagagaataaaaagttgcaaaaattacttaaaaaagaaaaagacgaaaaatctgcagatgtagaaaaacaaacaaaagccttacaacacgcaattcagaagccagtaaatgataaatcttatacagggtggacttccgatggacatacaggcgaggatgttaatacctacgcttacggacctagatcagaatcatttagtggtaatatcgaaaatacagaaagcgcaaaaataatatttgatatattcaagtaaagcataaaaaaattcccgagcactataacaaggtgttcgggaattttttatggtttaatttagtactcaatgttaggtgcttggttaacacgttcttggtattttttaaatgcgtagtataaaccgccaactaatgttaaaataactgctaattttttcatcattcaaactcctttctaagatgtgttgaaactgagttcaattaaattatatgtttttattatacactttttgacatattttttaaatttaagaatgcgaagatttttaacatttctgatgctagctttctttttcatctttcaaatgcttaataaaatcaaagccaggtcgccctttagccaatgcttccatcacatcataccaatccgaaccgacttgttgatatatattttgcaataattcatcttgcgccttgttcaattcagcaatgagttgatcgcctttatccgtcgaatataattttttgacacgtcgatcagtctctaaaactttttcaataatgagaccttgctcttttaatttttgaagtgttgcatgtgatccttgtttagaaatttctaatatttctagtaatgatttaatagtaataccaggtaatttattgataaaaaacaaaaaacgatgatgctgacggctcataccatacttctctataatttcatcagcggtagtaataaacgttttatatgcaaaataaaacaacatatgctcataatcgtttttattggtcgacatgatgatgactcctttcaaagcgttaacctcattataataaaatttataatgtaagtcatacaaatgatgataaaactataagctaaatctaagtttcacgagaaacatttttgcgtatcagcaaattgcgccaatcatattaatacaaatttaatttaaacactcagaaatgttagtcgtgcgtaaatagtttgtatctctcactctgtgtatttaatgcaaccacatattttccaggaaataattaatcattcaccatccatgttatagcacgcttaatcgcttggtcccaatatgcataatcatgatctcctggtccatcttcaaattgataaggaacatttttacgtgataaataatcgataaaatctaagttgtcttgatataaaaagtcttgtttaccacacataatgagcaattttggaatttgtttatcttcagctacagctttgtctagcaaataatacggatcatgttcagttcctttaacacttgaaagattgccaattatggcctcttttgaaaaatcattccactctagatccattaaattttgcgcttcaaacacagcagataatggtacagctttggcaaatttatccccttgtgttaatgcaaatttaattgtgccatatcctcccatagagtgacctgctataaaattgtcatcacgctttttggaaagtggaaatatttgatgaacataatcatatacttccaaaatataatcataatagctatgaccatatgccatgttagcatatgcgctatgatccacattgggcataatcacagctaatttgtgttcattcgcatacctttctatgcttgtatatctcatatatgtcgtttcatcacttgataatccatgtaacaacattaaagtttttaatggtttagcagttatatcgttattaaagaagctttgatcttccggtaaaatgactgtcaaattttgatgcataccaattgttggtgaatgatagtttaatgaaatataagccatacgtcatgacccctttctaattctactttatcaacattttacgcttaatcaattcactttaaaatcattttcaacaaaaaaaccgaatacaaatgtattcggcctaaaaaagtatttacgctttttctttatgatcttgcttgcgttttctaaacaatagtaatgatcctaataatgccatcattgcaccaaataaagttgcatttgtgttttcgctcttatctcctgtttctggtaaagcatcagttttgtgttgttttgataccttattagaatggtttacttcacctttaggatttgatggtgctttctgttcattatttggtggtgtaactcttgaatcggagtcactatctgaatccgagtcgctatccgagtctgagtcgctgtctgaatctgaatcgctatccgagtctgagtcgctgtctgaatctgaatcgctgtctgagtccgaatcgctatctgaatctgagtcgctgtctgagtctgaatcgctatctgagtctgagtcgctgtctgagtctgagtcgctgtctgagtctgaatcgctatctgaatctgagtcgctgtctgagtctgagtcgctatctgagtctgagtcgctgtctgattctgagtcgctgtctgaatctgaatcgctgtctgagtctgaatcgctatctgagtctgaatcgctatctgagtctgaatcactgtctgagtccgagtcactgtctgaatctgactcactatctgattctgagtcgctatctgattctgagtcgctgtctgaatctgaatcactgtctgaatccgaatcgctatctgattctgaatcgctatctgaatctgaatcgctatctgaatctgagtcgctatctgattctgaatcgctatctgattctgagtcgctgtctgaatctgaatcactgtctgaatccgaatcgctatctgattctgagtcgctatctgaacctgagtcgctgtctgagcctgagtcactgtctgaatccgaatccggatccgggtctgggcttggttccggttctgggtctggacttggttctggatctggcgttggttctggttctgggtctggacttggttctgggtcaaccggcggccctggagttgggtctttcggatttactgctgaatcaccatcagcacttccaccaccataacgtacaacattctcattattccaaccgaaaatactgtagtctctatttgttacaggatcaacattttcttgaataacctgagtttttaagttcttacctgtattgtcgtaatgcccttctactaatactacatatgttttagtaatatcaccaaatttaatactagctacatttggatgctcataatagattctatttttaaattggtctgttacttctttaaggttagagtcatttggatctgcatagtagctatctgataatttagatgtatcattcacttcaaaaattctcagttttgtatctgtagcacttactttaccgctactttcttcgattttatcttggtagcctttaatatacacccacgtattacctaaaactcgttgcttagggttaacaaatactgtttgcttgtatgtgttttgacctgaagctgtatctacaccaataatttgagaagaaatgttcgcgccatttggtttatcaattcctgcaattggcgaactatagttataagtaattttattattaaacatttcatccgcaatattaatattcgcatcatatgttcctgatttaggtgcctttgctcggtctgtaaataaaggtaatgaaaattgtccgttaatattttctttattatttacataatctgtaaagacaaatgtatacgtcttagtcaagatatcatatgttgctttagctacaacatcgccattcgtacttttaatgtctgcaattggcatcgtattatttgaattagaataatccacgtctccattaccagttaaactatctggtaacttcgctgtaaaataatcccctgatttcactttatctgtcactgtaaaatttgccgccataaatgtgttaccactttgattagggtcaaatgtagtcttttctaacttgaaattacttgccgtaactttatcatttacatttgtacctttagcatcagcagcatttactaccggttcagcaacagctaaactacgtacagctctcgttctaacacttggtttactagttccttgcgcattggaaatcgtttgtggtgatgattgtggtaaatctaatgtttgagaatttttaagctcactgtttgttgctatgctattagcatcattcgttgttttattatctacttgagaatttgcttcttgaggaacagtttgatcttgcatttttgcagcagttgcttgatttttaattgccgtcggttgaggtgtttcatttgttgaagctggctctgttgtagtggtattgctcgtttgtgtagacattggttttgttgtgctatctacattcgcactgtttgtgtttgcactaatatcagatgtatcattagccgttgtatttaattgaggtgtttctatcatattgtttttttcggaatctgcacttgcattatttttcgaagattgcgttgtatcgttcgattgttctgaagcttgtgcttgatgattgcctatcccaaatagtatagttgcccctactattactgatgtggtacctactgtaaaacgtctaatcgaatacttattctgcttattcgacaaataatcaattctttttttcaaaaatattactccatttcaatttctagattagtctaaattgtataatgaaataagaattatatcaattgcttttcgaaaaaaattacgtaaaatttgttttcttcctatttatataacttaaaattttctgttaactagcaaaaatcaatatactatttttacactattacaaattttttacttttcaaaaacttagaagttctaaatttttcatcaccttaaattttactgtaatttcaacaatcaaatttaactaacattttaaattattcatcatgctagcaaaaaaggcctaacgtataaatgtacgttagacctcatgttcaacttattcattttacattgtatattaaacacatacatcattgaataaatgtttgcttactaaccaatttttatgatctttaacaacaagtttttcatctttaagttcatgaataatatgaccagctgtttcccgggaaatcccagccatatcactcatgagttgaatagttaaaaactgtttgatttcataaaattcatcttgatcgtaccctactgtctgacatagatgacataacaatttaataattcgatctttagcaaatttacttgttaatgccatgttatagttcatgtgttgctgctcattatcatttattaatgcaaaaagtgtcaaaaatatatcatcattagctttgcacaaaaaagccatcaattctctaggcaatccaagaactgtacaatcggttaatgctgtacacaattcgttaacctctttcggatgaaataagttactgattggaaataatacttgctctttattaaaataacgatatacatctccattttgattgtaatgttctctaataatattaccttcaattaaaaagtaaatattgctactttcttgtggcgaaaaataaataacttggcctttcgtataatgtctgacaaaacattcactttgatatggttgtaatatactatatgggatattaatgtaatctgctaatgcctttagttcatgttctaatttattatttctacccaaaataaagttttctgtcataagttaaactccttcaaaccttgcaaagtgtcagcagacaactttttcatttgaatcaacggagaaacatatttaatgttttgtcgcgtgataaagtgctacatgtgaatgtgtgtacctttattaccaatcaaagcttcgtatgcctgctctaaattggtaatgataacttttttgttttccccactttcaacaaatcgtatcgcagcttctatttttggcaacatcgatccttccgcaaacttaccttgtgccgcgtattttttcagtgttgctacatcaatatcatcgatttgttgttgattaggttcattaaagttaataaatacattttctacattcgtaagaatcattaaggtatctgcttcaatcagcgttgctaatttctcactagcaaaatctttatctataaccgcttcaacaccttcataggtattttctttttttataactggaataccgccaccaccgcatgcaatgacaatatttttaccgtctgctaaagttcgaattaactggtgttctagtatagattgaggtagtggtgacgcaactacttttctataaccacgtcctgcatcttctttaaagactgagtctggctgttctttttgtaattcttcaacttcttctttcgtataaaaaggaccaattggtttggttgggttattgaatcgtggatcatctttatctacttccacacgtgtaacgattgtgcctacagttctatcactattcatttcagttaaaatgcgattgatttcagtttccaaccaatagcctatcataccctgtgacattgcaccacaagtatccaatggcattgccggcgttgtgtcactgttcgatttagcttgttggattaataaacttccaatttgtgggccattaccatgtgaaatgacaatacgcgctggtgaatcaaataaaggtttaaggttttgcatcgcacgtctaatagctgtttgttgtgcttcagctgttgcttcttttgtctgtatcgcattaccgcctaatgcaatgacaattttctctttcatatttttgtcgctccttttaaaaaacatttatcgttcccatcaataacttaattaatccgataactgcaagtacgataataatcataaaaagaatatagtctgatttaatcaaacgtgtctgattattcttttgaacgattgaataaacaagaagagctggaatataaagtaacatcgtcaataataagtaattgatacctgctgcatatataagccatatagcataaattgaggctatgatgccaatcgtccattgtttagtagttgcttgctgtcgatgctctaaagtgtatttaacttggtaaaatgcactgaacatgtaagggtataaaatagcacttgatgctagtgaaaatgcaaattgatacgcactctgtgtaaatagcatacttattaaaaataattgtactaatatattggtaataagcagtgcatttacaggtgctccatttttattttctttagcaaaccactttggaaataatccatcttttgcaacaatgaaaggtaattcaccagcaagcaatgtccatcctaaccatgcacctagtaccgaaataattaaaccaatatttacaagtgtagatccccaaccacctacaatagttgcaagcacctgtgccatacttggcgaatctaattgagaaatatgattttgcaaaatcacgccttgagctaatacagttaataagaaatagataattaaaactgatataagtcctataaccgtggcactacctacatcttttttatttttagctctactagaaaaaattactgcaccttcgataccgataaacacccaaactgtcactagcatcgtacttttaacttggctcattgtgctcgcccaactaaatggcaatacaccctctgacgtcataccgaaaaagcctgttttaaaagtgtcaaaattgaatgcaattatcatgcatatgattacaagtaaaatcgggattaactttgcaacagtaacaatactattgataaatgctgctgtttcaacgccttttaaaatcaagaaatggacaccccagagtagtaacgaggcgacaataatacttggtaatgtgttgcctcctttaaaaatcgggaaaaagttacctactgctgacatcaatagtgttgcataggcaacattgcctaaaaacgctgagaaccaatatccccaagcactgataaatcctacaaaatcgccaaatcctgcttgagcataactataaataccaccgtctagctccggccgttcattggttaaattttgaaatacgaacgctaatgaaatcattcctatagctgtaataatccaaccaataataatggctaatccaccggctttaccgcccatatcagacattatattgaacgcaccgccaccaatcatggatcctataactagtccaattaaagaagatttactgagtttgttatctcctgattcgttcatattcatttctcctttaataccaatatgaggtgtctgtacatgacacttatatcatcagacacatcatattcatatcgttccatttagtgattaactccccaatgttgctgccattactgccttaattgtatgcattctattttcagcttgatcaaacacttttgaatgttcacttctaaagatttggtctgtaacttccatttcagctaatccatatttttcataaatttcttgtccataaagtgtatttgtatcatggaatgctggtaaacaatgtaagaatatcgttgaatctttacctgttaaatcaaacatctgttgattcacttgatagtcttttaataaattaatacgttgttcaaattcactttcttcacccatcgatacccaaacatctgtatatatagcatctgtattttcaactgcttctgcaatattatccgtaatcatgattgaaccaccatattgactcgctttttcttttgcaatatcaacatatgcctcttttggatttaatgatttaggtgtacaaattcttacattaacacctaacatagcacctgctaccattaatgaatgcgcaatattattacgtccatctccaacgtaagttaagtttattccttctagatatccaaaattctcttttattgtcataaaatcagctaacatttgtgtaggatgccaatcgtctgttaatccattccacaccggtacaccagagaacttcgctaaatcttcaacagcttgttgtgaaaaaccacggaattcaataccatcgaacattctacctaatactttcgcagtatcctctacagattcttttttgcctaattgaatatcatttttccctaaaaattctggatgcgcacctaaatcaatagacgcaactgtaaacgctgcacgcgttctcgtcgaattcttttcgaatagtagtgcaatattttttccagataagtagtgatgcttaataccgtttttcttatactcttttaatgtaattgcaaaatcaataagtccttcgaattctgctttggtaaaatcactttcttttaataatgatctgccttttaaatcatacggtttttgaatttctgtcattattttcaccctcgcttctataatttattacgttaaatgtcttctctgaatagtggttgactcatacatctagggcccccacgtccacgtaccagctcgctaccagatatttcaatgacttttatgcctttttgtctcaataaatcattcgatacatagtttctatcgtaagtcactacaacgcctggtcttatacataatgtatttgagccatcattccattgctctctagcaccatcaatgacatcaccatttcctgttggaatgaattggatatcatctatacctagtacgtcttctaaagtatcttttaaatgactagattgtttgatggcaatatctttatttacgtcatcatattcaataataaatatattcatattgccttctgcctttaaaatggctgaatgcattgtaaatttgtcataatctatcattgtaaatactgtatctaagtgcataaaagttcgactagttggaatttcaattgctactacttttttaaacgtcgcctgcggattttcaaaaatacgtcgcgctaacttttcaatagcttgtgcagatgtacgttctgaaacgcctatagccaagacatctttagataaaacaagttcatcgccgccttcaatattgaatgggcaatctcgatctaaccagattggaatattcgcatctttaaatctaggatgatgctttacaatatattgaataaatattgattctcgtcgtcgtgctctccagaacatccgattgattgttataccgtgtcctattgaggcttgtggatctctagtaaaataaaggtttggcattggatctaaatagaatggatacttatcatccatgtactctactagatgtgtacatttcggattaatttcttccttacgtacccctgacattattttatctacaagttcttgattagaaagtgtcgcaaataatgtcttaatttcttcttcatgacctaatattgtttttttagactctgctaatacatcatcaataaattcacttcttacttgaggattttcaatactttcagctgctaacttctcaaggtaaagtacttcaacaccctcttctcttagcacctgcgcaaaatggtcatgctctttttgagctacttctaaatatggaatatcatcaaatagtaatccatctaaataatcaggtactaaattttctaattcttttccaggacgcttaagtaacacagtttttaaagctccaatttcgctatttactttaattggaccatctgtcatgtctatttcctccttttatctttgaattcatttagagtatagacaatcttcaaacgcttacatgtgattatattcacataaagaaagtcgaaaatttcatatctttttgttatacaatacataataatggatttttatacataaataaaggtgttttgggtcaaaatatacattttttattcaaaaagacccacaaaaacacgttgtataaagttttttatacagtcaaatgaatgactatgaattctttctttccataaaaaaacgcgtacacaagttaatatttggtaactaacttgtgtacacgtgatacgaaactaatttttattattcatttgatacatgtctatttaaataattttgcatatacgtattctgccatatcatttgaggcagttaagattaatgtagtgtcatttccactcaccgtacctaatatctcttctatatttagctgatcgataaaatagtttatgccttgggcgaaaccaggtgaggttttaacgataatgtatgaaccattgatgattgaacttagaacttcatgttcacaatagtgtctaaacttttctctcatctcttgttctgtttgattattaatagctttataaatccatgtttcacaatcgatagggacacgatatatattaagttctttcaagtctttagcaattgttgttgcactatatcttacaccaaaatattcttcaatatatgaaatgatttgttcttttttataaatcttatgctttttaactattgtagaaacaatttctaatcgtttacttttcttcatattgtaaactcctttggtagttacgtttcttgtattaaaaaataaattcatgcatgtttcatttataatttaacactttgttttgcaaaagataataaaaatacatgtaaattttttgtgacaacttttaaaatgaattttgtattctaagtcagcatttaattatcacatatctactacttgtaatgattttagactgccgagtagtctttcggcagacaaccctcacactcctctcatctaattacaaagagagggtatacctacaaagtcaattatcaatgtaggtataccccatatataagctgtatttaaaatttaattatttataagtgtttaacattacttcttcttgtttatatatttttactccacgcctacttcattccatgcttcatacacctgttcagctgtttgctcgtcatataaatctttagccgcttggtataatgcatctttacaatctttgaagtttgaattacttgttaagtattccgttaatgctcggtagtaaatttgttctgatttagatttccctattgcttgaatcacgttataagctgctttatttggaattccagaattcgtatgtacgccaccattatctttttcagtgaatacatagtctttcatatgagctggttgaccaaattgttctgggtttgacatgctgcgtaaagcgtccccctcttttccaggtgtgtagacatcttcacccattaagaaatcctcgtcatctacaaagtatccaaaaacatctgaaaagctttcatttagagcgcctgactggtccttatattctaagttcgcagtctcttgtgtcacaccgtgtgttaattcgtgtgccactacgtcatttgcacccgataaacttgtgaatgtgcgaccatcaccatcaccatagatcattttgtcaccaatccatgcggcattatttctgttatcttgaccaccgtagttattaacatgcgttaatgaaacaattggactaccttggttgtcatatgattcacgaccaaatgtgtctttgtaataatcatatgtttgtttagcgtaataatttgcatctacgccagcacgttgctcatcttttacgaagttttcatcttcattagtaatcaatgttgcttgacctgtttgatcattaaagctaaatgctgataatttaccttgatgcgttaaatcttctaggctaaatccaccgtcaatactattgatattgatatcttttgtatcgccaagtacaccttttcctttaccagtttctgcagcttctttaactaagttcattttttctaaaatttcgccagtttgagcatcaattttaactttccaatgtgaaatttctggtgtcactgtaattaactcaacattataaacgtatttattactgtcaccatcgatttcaactttgttttctttaatgactttatctttaagatttttcgctttatgcttatcaatcttaactgctttaaatgctttgtcggctgcgtcatctttacttaatgtcactttattcgttggctttactttcttcgcatcagtatccccattgattaaaacgacttttcctgatttgtctgcgtgtactttcacttctttgtcaggtgcatgaacaccatcaacactcggttgcaatgtataatgcgtaaatccttttttatcagtttttacatcagtaacagcgtaatcttgataaatattttttacattttcggatttaggcaattcttttaatgctttgaccgcatcactcttttgagtcacctcaaatttaatatcagaattagctggtttattttttgaatcaatcgctaatgctgctggtgataaagtgctcaacaatgttactgctgccatacttgtaaatgcatatcttgaaaatttcctcacatttcattcctcctgaaatcttaaaaacagcttataaataaaatattaatttaatttttcagaaaagtaaatgattatttctatttatttcgatactttttgttcgttgattttatttattgattcttttcttttttaaaaatgttatctgtagctaaataaaattttaaaaattgagcttaattatattttaaaatttatcaaggctttatttttgtgaaaatattaacaaatacaaaatagtgctctatatacttaatcaatgcttgaaatatgtgagataactatttaaataatcatgatcaaataaacatttttatcaatttcaaacaactatgtaagacgcaataatcgttattatttaataaaaaagactagaatgcggtatctctcctcacactctagccttaatatgccattattttatttacttgttttgtatggtgtatgtccaactgttacttcgacaactctattatgatcaacgacaaaccagatgcctaatgtctttttagcattttgatagtaaaaaataccgctatcagcttcctttgttttaccattttcttttttcaagtccttgccataagctttttggatatcttttaatgaaatattatttttaactacaaattgcaattgacttgcttcgtttccttttgcagaaacacctttaaaagtttgatcatatttctctactttttttatcgtattcgttttagctaatttaataccattgaatttcacattatcatacttaatcgcgttaataaaattcttatccagaataaaattagcattattaccaatataaccattataagtataatatggggttattgctgcctgtacctgtttacttgttggcgccgaattttcaacaactgttactccaatcagtgtgcccaatgctaatgttgctgctacacaaactttactggttttattcataattatctctcttttccatacaaatattttattccttacacttttattataactttttcagccataaaaatactaatgattatatttataaatacataacagttttgttatactaattgaagtacacaaaaaacaatgaaaatattaatatcgcctacttttctaatatttattttttaaaatgattatggcaatattgaaataaattatttagcttcacgtatcaactacttttcattaacatggaggcgttatatttgaaaaaacttcttattaccatcgtaattatcgtattaatcggagcacttgggttcgcaatttatgctgcaataaatcattctacatcatcaagtaataaccaagaacaagaaaataaatctacgcataaaaaaacagaaaccgaagaaaatgatcaacaagatgatagtgcagacaaaacagataaaaatcaaaataatggcaataacgatactaatgacaatcaaccatcttcaccgtcaaatgttcctaacaaccattcaacagtaccatcgaatacgcaaccagctcagccaaaagactcaaattcaaataaaaataatactcacggtggtggcagtcaatcgtcaacaaacaaccaaaataatcaacaacagaacacaccacctgctaataaatcaaataataccaatacgccttctaaacaaacacctcaagcacaatcacctaaaaattaatcatttgcctgatacgtccacaagtaccagatgcataaattcagaaaaacagcagtgagatatttttctatttgaaatatcttactgctgttctttatttgcataattcgcactctgttaaaatcatataaaagttcgctttaatgtcattgacgtatgtataagctctcatgtttaataatattaatacacctttaaaaacgcttacacgaaaaatttagaaaggaggtacatgttaaatgcttgatagacacttaaaactactccagttttttattaaaaatccatcaaagcacattagttctaatgaaattgctgaacatgtcaatgtttcaaaccgcacagttcgcaatgatattcatgttatcaatagcaattttatggatgatatcatcgtaagtattaaatctaaaggatatcaattaaatacatcgcagtataccttagaaacgataactgaacgttacacgcatattcaatcatataaagaaaaactattattatctatggcgtatcaactgctaatgcacaataaatcgcagacattgcaacaactagagcaagattatctattatctaaaactgtgctcaacgactatttcgttcgaattcaacaatggtgtcaaaaatttaatatcgttttaacaatcaagaaaaaacaaggtattgtggtcgatggaacagataatgatatcactaatgccatcatccatttaaatcaattatcatcagggcatgtacatgttgaagacctaattttaaatgaattacctgattcacaccaaaggatgatttcgcatattatacaagagacacttcaacaacatagtattgaaacaactgatattcaaatacaacagcttttaattcatctcattttaatcattaaacgtaagcaatctttaagtgagctagacacgttaaaccatgatgcaaaattgatatctcaatcttgcattaagcaaatcaacgaaagattaggttatgacttgaacgaaaaagtaatcaatatgttttcattctttattgcttatcattttaataaactcgatattggtatagaacgtatatttatacaaagttatattgatcgcttaatcgaattgatgcagcaacgtattcatgtacctttcaatgaagattcgattttacaacaaaatttatataatcattttagtaaagcatatttacgtatcactcaaaacatttatttaaacaatcctttagttatagagattaaaaaactctatccctttgtgtttaacacactttttgaagcgattgataaattagcaattgatactgatatagagatgagcgaagatgaaattgcatttttaacaattcattttcaagctgccatcgagcgtcgtaccaaaacacaattaaatgtagtcattgcttgttattatggtctaggtgtgtcgaattttttagaaactaaaataaataacttatccgaagagttgtcagtaataaatacgattaaactagaaagtataacacactatcactttgacaatgtagatttattaataacgacccatgatattccaaaacaaacgctaaacatacttcctaagcacctgacgactatcaaggttgcaccattattttctgaagatgatcgtcacaaaatcagacacgttgtgaagcaaaagcaaaatccggttcaagcacatcatcatatggacactgtcaatttccttgtcgtaaatactgaacaaaaatcacggcatactgtgcaaatttttgaagaagctcaaaaaatattacaagcacatcatgcgattgtagaaggatatatcgaatcagctttagagcgtgagaaatcatcttctacatacataggtaattttatggcgattcctcatggagatcctgaaaaagttttacaatcacatgtgcttatttttcgcacaaaagatgtttttccttggcgacaacacgatgtaaaacttgtctttttcttagcgatttcgcataaagacaaagcttttacaaaacaaatgatgcaattaattgctaacttggatgatgattcagtgaaccatttatgtagtttagatgatcatagtttaaagcaacagttatttgaatacttacaagaataattgccactagtaacggtaattattctttttttagtatcgagaatacgcttacaatatagaaaaggagatgattttatgaaaattgtagctattacctcatgcccaaatggcattgcacatacatatatggctcaagaaaagcttgagcaggtagcaaaagaaatgggtgtggatattaaagtagagacacagggcggtgttggtgctgaaaatgttttaactacgcaagacatcgaagaagctgacggtgtcataattgcagctgataaacaagttgatctatcccgatttgttggtaaacggttgattaatgaaaatgttcgcgaagggattcataatccgagaggtctaattcaacgtatcattaatcaagatgcgcctatttatcaatctgaaacaaattatcattcgaaagatcgcggtaagtctaaaagtggtattcaaatggtgtatcaacatttaatgaacggtgtatcgtttatggttccttttatcgtagttggtggactccttatcgccatcgcgctgactctaggcggtgaaacgacatcaaaaggattagtcatcccagatgattcattttggaaatccattgaaaacattggtagtttagcctttaaatttatggttccaatactagctggatatatcgctgttagtatcgctgacaagcccggtcttgttcctggtatgattggcggcgctatcgctgctgacggtagtttttatggcagtgatgcaggcgcaggatttttaggtggtattgttgctggtttcttagcaggttatatcgcaaagtggattaaagatattaaagttccaaaagcaatggcaccaattatgcctatcattattattcccattatttcatcggtcgttgtaggattgatatttatatttttaatcggtgcaccaatttctaatatttttgaggcattaacaacctggttaaaaagtatgcaaggtgctaatattattatacttgcgatgattataggtgcgatgatcgccttcgatatgggcggtccagtaaacaaggtagcatttttatttggctcagcacttattgctgaaggtaattacgccgttatgggtatggtcgcagttgctgtatgtacaccaccaatcggtttaggtttagcaacgtttgttcaaaagtataaattcaatcattccgaaagagaaatgggtaaggcttccttcactatgggactatttggtattactgaaggtgctattcctttcgcagcccaagatccattgcgcattatacctgcaaacatcattggtgcaatgattgcatcagtcattgcagccattggtggtgtcggcgatagagtcgcacatggaggtccaatcgtggctgtattaggtggtattgatcatgtattatggtttatctttgcagtgatagtaggtagtcttgtcacaatgactactgtactattattaaaacgcaatacaccagttatagcagtagatgcaccagcgcaacacacgcaacttcatgatacagatattacacaacatgatacagaggttgacaatgtagataaaaccgcgaaacattcacatctcaataaaccttctcatgtttttgatcaacaaactatgataattactgatcacgacatgtctcgaaacgaagcaattgatatgttgattcataaacttaaaatttgccgttatgtagagcacacatcgcatttaaaaaatgcaatactagaacgtgaaatggagtctacgacagctattggcatgaacgtggccattccacatgcaaagtctgatgttgtaaaacaaccgattgtagctgttatgaaaaataatcatggtgttaaatgggacagtctagatggtagtctacctcaattgatattcttaattgccgtaccaaacaacagtcaggatacacatttaaaaatacttcagcgcttatctaaagcgttaatgaatgatgagacacgccaatcactaattaatgcaaacagtactacagaaatttataacttattaatgaaaatatagaggagttttaactatggcattatttttacaacccgtttttaaagacagaatttggggcggtcatgcattaaaagcatttaactatgatatccctaatgaaacaactggtgaatgctgggcaatttctgcacatccaaatggtcctaatacaattatcaatggtccatacaaggatatgaccctagatcaactttggtcacaacatcgtgaattattcgataatgattcacgagatagtttccctctgctaactaaagtattagatgccaatgataaattatctgttcaagttcatccagatgatgactacgctttaaaacacgaaggcgaactaggtaaaacagaatgttggtatattttagatgcagccccaggtgctgaaattatatatggcgtacatgcacataataaacagacgttaatcgacatgattgataatcatgaatttgacagtcttttcaaacgtatacctgttaagcccggtgacttttattatgttcctgctggcactgtccatgccattggttcgggtattttaattttagagacacaacaatcatccgatacgacataccgtatttatgactatgatagacgagatcaaaatggtcaattgcgtgatttgcacttagagcaaagtaaagatgtgattgaattaggcaatcatgaaccaaatactactcctataacaactcacatcgacacacacactgtaactcaatttgtagataatcaatattttgcagtatataaatgggatattcatggagatttaaaattcaataaaccacatgcttattgcttagttactattatcgatggtactggtactttaacagtaaacgataagcactatgacatccaaaaaggttctagctttattttaactacggaagacgaggatattcactttgtcggtaatattagtgctatagtaagtcatcctggataatagcaatgataacaaccgtcccataaaagacagaaattactatctcttctgtctaaaaacataaaaatccacacattaaggagctataaccctaatgtgtggatttaatttttattctgtaacgttactttggtcaactttttcagatacgcgcttcatcaatggatctgttacaggttttaaaattaaacctacaacgaagaatcctatgccaaataacgttaatataattaattttgtaattaggatttccggaacaataccgcctactgtttcacgtaatgaatcaattgcatacgtaaatggtaagtatggcgaaatgttttggaaaaattgtggcgtagtttgaattgggaatgttcctccaccacctgcaatttgtaatacaagcaatacgattgcaattgctttacctgggttaccaagtaatgatacgcacgtatatacgattgagttgaaaataatcgaacagaaaatcgttataagtacaaataatacaggtgactcaactcctgcttttaggattaacaaatctccaaccgatacaatgagtgcttgcaacataccaagcattataaagaatcctgccttacctaagaacacttgtcttgtcgttaagactgactctagactcttatgtttattatcaaccgttaataaacttaccatcaagagtgcacctacccatactgacagtgcagtatagaatggtgtcatacctgaaccataatccttaactgggaaaacatcaacagtcttcttattaataggatttgcaataatacccgcttgctttttcaaatcattcttaagtgtgtcgattaatttgtcgactgcatcatctttgtctaatttcttgaaaattttattcgcttttttcaaatctttttcaacatcaggcaatttattttgagaaaaatcagctaaatctgataaagcctttttcgcttgtggctgatttttatttagtaatcctaccgcttgatcataaccatttaataacgttggtaaatttttattcacacttgctgtcgcattagttaatcgctgttccaactgtggtaagtcattgcgcacaaagttagcagctttagctacatcacttttcactttcgggaagtttgcttgagcatttttaacagcactaatgtattgttgttcaatacttggtaatactgtttgtaagcgatcaatacgtgttttaccattttttaaaatagcttgtccactgttaatgacttgatcaattgtatttaatttagactgaacattggataatgcagtttgccctttgttcaattcatccataatacgttgtgatattgatactaaagagctgttaagatcttttttaacataatctctaaatgatgataatgatgaatctagttttgaaagttgatctagtaatttagtagcttcagcagttcctgaactaccattctttaatgcattgcttaattgattaactaaccttaatgattcattaattcgattattagctgcttttaccttatcaatttcttttgataaatcaacattttcattcttctcaatctcttttaatgtatcgataaattgttgattatattgcgttgtgtattctaaaccggacttaacattatctaaagactctctaaaatcagaaggcttgtccgatgctaaaatgccatacgaaatattacgtaatgcctgactatctttttgtgcggctttcgcttgggtatctaaattatttgataatgataataaagagcccgttaatgccgcttccattgatttaacatctttatctgtaatgttttgtgtgttctcgttagctgtgctgacttgtgttgttgttatatctgcaaaactttgaccatcttttttcccgcttgtactttgtggtgtagtcgatacaggcgcattattactatttggtgcggtattttgcgtaacattattatttggtgcagtatcgccacttggtgcacttggtggcgttgatgctacaccattaccagctgcaggtgaactatttgatgtttcgttgttcgccgcgctattttgaggaatctgttgctggtttcttcgatttaaatcttgcgcgcgtcgaattgcatcttgataatcaccgactctacttctaacttgtgtgacgaagcctttggcatcatttaactgtccattagcttgatcaatcccttgactcgcaatgttaagtccttgattaattttagggaactgcgctggcacgtcatcagctgcaaaatttaacgctttttcaattttcggcatataattatttaaagctaatatcaacttagccttttcattaagttgcggaatagcaccattgacttcgtttaattttttctgagcatctaaaatatcacctttataatttcctagttttctaaaatcattggcatatttatctaaatccgcttggtggttattcaaatacacaattttattcgcaaagtcattaatcttaggtaaagctttatctgctgaatataccgcattttttatcttgttaattgtcggcacattttcttcaatagttaaacctgctttgttagcttcttctaataatgctcgagttactgttttattaaattgttcattcgctttttcaacgacaactgacgaaccagtatctgttagcttagacgcaacagcgttaatcttctgattcaccttaaattctacatctgctttttgaggctgcttacgtagtgtcccggtaatttcatgtgtaaacttagatgggatgtaaatacctgcaaaatatttacccatttttatctcatgatcagctttctctctacttacaaactgccaatcaaaacttttatttttcttgagtgtattaaccatcgtattaccgacattaacttttttccctctgattgtgtcgcctttatcttcattaacgactgcgaccttgatgtgtcccgtgttgccatatggatcccacattgcccataagttaaaccaagcgtagaacgatggcaaaatagctaagcctgctaagataatccacacagctggcgtcttagctactttcttcagatccattttaaataatttaaatgcgttcttcattgtcacactcctatgtaggaattattcatattttttatatattttttgtaaattaatttatttttgcgttgtgaattagtataatcaatttactggaagatatttagtcgattgatacctatcaactattttcagcatacgataaattataacaaatcatagtttattatcacacttaattattatatttttcaagggagaatacgaaatatgcctaaaaataaaattttaatttatttgctatcaactacgctcgtattacctactttagtttcacctaccgcttatgctgatacacctcaaaaagatactacagctaagacaacatctcatgattcaaaaaaatctaatgacgatgaaacttctaaggatactacaagtaaagatactgataaagcagacaacaataatacaagtaaccaagacaataacgacaaaaaatttaaaactatagacgacagcacttcagactctaacaatatcattgattttatttataagaatttaccacaaaccaatataaaccaattgctaaccaaaaataaatacgatgataattactcattaacaactttaatccaaaacttattcaatttaaattcggatatttctgattacgaacaacctcgtaatggcgaaaagtcaacaaatgattcgaataaaaacagtgacaatagcatcaaaaatgacactgatacgcaatcatctaaacaagataaagcagacaatcaaaaagcacctaaatcaaacaatacaaaaccaagtacatctaataagcaaccaaattcgccaaagccaacacaacctaatcaatcaaatagtcaaccagcaagtgacgataaagcaaatcaaaaatcttcatcgaaagataatcaatcaatgtcagattcggctttagactctattttggatcaatacagtgaagatgcaaagaaaacacaaaaagattatgcatctcaatctaaaaaagacaaaaatgaaaaatctaatacaaagaatccacagttaccaacacaagatgaattgaaacataaatctaaacctgctcaatcattcaataacgatgttaatcaaaaggatacacgtgcaacatcattattcgaaacagatcctagtatatctaacaatgatgatagcggacaatttaacgttgttgactcaaaagatacacgtcaatttgtcaaatcaattgctaaagatgcacatcgcattggtcaagataacgatatttatgcgtctgtcatgattgcccaagcaatcttagaatctgactcaggtcgtagtgctttagctaagtcaccaaaccataatttattcggtatcaaaggtgcttttgaagggaattctgttccttttaacacattagaagctgatggtaataaattgtatagtattaatgctggattccgaaaatatccaagcacgaaagaatcactaaaagattactctgaccttattaaaaatggtattgatggcaatcgaacaatttataaaccaacatggaaatcggaagccgattcttataaagatgcaacatcacacttatctaaaacatatgctacagatccaaactatgctaagaaattaaacagtattattaaacactatcaattaactcagtttgacgatgaacgcatgccagatttagataaatatgaacgttctatcaaggattatgatgattcatcagatgaattcaaacctttccgcgaggtatctgatagtatgccatatccacatggccaatgtacttggtacgtatataaccgtatgaaacaatttggtacatctatctcaggtgatttaggtgatgcacataattggaataatcgagctcaataccgtgattatcaagtaagtcatacaccaaaacgtcatgctgctgttgtatttgaggctggacaatttggtgcagatcaacattacggtcatgtagcatttgttgaaaaagttaacagtgatggttctatcgttatttcagaatccaatgttaaaggattaggtatcatttctcatagaactatcaatgcagctgccgctgaagaattatcatatattacaggtaaataagtattattaaacccgcaaaatttataagtataaacaaggagttcggacttaaacatatttctgttcataagtccgatttcttattcaattaaacccgaggtattcagttcgaacgcctcgggtcattttatataaatatattattttatgttcaaatgttcctcatcatatccgtttcaattgtcatctcacacattttataaatatgagcaaatgtacttattttcaaacattactgcctagctttaattgacgttatattaactataaactacttttccatgactctacggattcaatgtcacatgagcgtgataaaatttgttcaataataaagtcatgtttatcatctgatctatcaccaacagcatcttctaaaacagtaatataatagtctttatctacactttctaatgccgtgctcaatacagctccactcgtagagacacccgttaatactaaatgattaatatcatttgcacgtaaataaacttccaagtaactacctgtaaatgcgctaaagcgtcgcttagaaataatcggctcatcttctagtggtgctaaatcttcaagtattcgtgtagatgcatctgcttcagtaatcgcatatccttgagctttaattgttgaaaacactttattactcgaggagacatcattaaaatgcttatctaacactaaacgtatgaaaatgactggtattcgatgttgtcttgctgcttcaattgctctctgattcgctttaataatattttttattctaggtacactactcgctataccttcttgcatatccaaaactaatagcgccgtttttcgagacatcttcattctcctttacttctgtagttctaagtcgttaaattcattataacgttaaaatgatggacaatctattcattgcattttgcatatacttcacaataatttaagggggaaataagacgtcttatatacttaaaaaaatatatagatgctcttcccccaatataattatgctttatttttcaacttattgcgtcgtgataaccaaatcattagtacacccattgcaccaacaattacagatatcggcaaccaatgttcttttatcgtttcccccgctttaggcaaagatacattaccatcagcatttaataatccacttaacaatccattacctttaccaagtgttaacgtcttttctggctttggtgtgggtatatctggaatactgtctaataaatttgatccttgattcattaaatttgctaacttatttaaatccgttgttttcccatttttattcaatcgatctagtaaacttggacgatttactattggtgataaaatatagtctatatcttttttcgtttgattgagtctcttttgtaaattcaataaatcatccgctttaccattcaatgccgatttaactaaattaaaaattttattttgatctgtttctattttagtaattaaatctgccagtaattttgccttttgtctttctatacgtgttgctaaaatcgtttcaattgcttgctttttatctttggcattattcaaaattgcttttaatatatcatctgaagacgtgtcgccagttgatgcaaaatgtttcttcaattggtcaacgatttggcgatttgataatcctttattcgtccaatctttagccaatttatctgcttcagcttttcctaatttcgtttgtaagatttgagaaatcaatagcgacttatcttgtgattgatcaatcaatgacgttaataaatcatcactcgttgtcagagatagttgatcaatatgacgagtaatttgatctgcaatttgttgatctgttttaccatcaacacgtatatcttttagaattttatctgcctcgtctttattaaatatactttctaaaatgctttgtgtagcatactttttatcatcagtacgtgcaagttcttccaaaataatatttcgttgactttttatacgctctttcgtcttatttacttcgctcattaagtctgatttttgatttttaggaagttgcgtatttgcaatacgttgatctaaagattgtaacgtattcagtttatgatatgtgtaatgttgcgttgaggcattacttttagccaatttttcaatcatagcatgattaattttatcgcttccttgtaatttatcagtgagttgattactatggctttgattctcttcatttgaaagaaatttatttaacacaacatgtccagaaccatcattatttggcgttttagctacttcatgattactatctgttgtagacactgccggatctttcgatgcatctttcaatgcatctttcgatttgtgtatttgctgattcaaatggtctaggtcttctaacgccttatttaccattgcttcatcatttttatcatctttttctccatattttgttgtagccgtttgtgacatatcatttttcattgcattaagatcgtcctcgccactttgttgacccctatcaacatttgaagaaacctcatttaaatctttaagcaattgatctaatttactgtctatatcactttgaccgttcatttcagtgtgagaacttttattttctttgctatccaactcattagctcgttttatgatttcatctatttgcgatgctgttttcgcttcatttagttgtgctttataatgtgctttagatgaagccgataactgttttaattgctcaatttgacgaattgctttgtcaactttgtctaataaatcttgcttagataatatctcttttgaaatttcagtatccttttcagatgcagcttgggcatcgtacggcaagatattcgttaaaatgatacttgacgccatcattgtcgaacacgataactttacatataattgaaacggtttccctcgatatttagccatcaacatactcctttctcacttacttccttcaaagaattacatactattatatacctgtttacaagaaatttacacttatctatctagttattgttgttagtaattatcaacttattacttagcttatatttaagtaaacaaaaaagcatgacgtaatatcatattgtccatgtcgctaacatcatattacgtcaaatcttttaaattaaatgatgctttattttagactgctttttctttttagctttcgagcgcctgtttaaaaacttgctcgaattgttcacgcgagatttcgtgtgcatgtgctttttgtgctaataaagcatctcgaaactgttgttgatctttcaaactttctaacatttgtattaattggtctttactttccattgttatctcatcattatgctcaaataagtgctctgataatgttactttagcatggtgtgcggtttgacgataacctaaaatcaacaactcatagtcaaacgcttgttccaccgcatttaaaatttcattaccctcattgatatcaagataaatatcacataactggtatagttcatttaccctgtcaatattaatagatgggtataagtgcacattagcatattgatcaagttgcattagcttatcagacatctctgtaatagcagcgatgtgaaaattaaaatctggtaaagtttcaaccaataccttgatgttacgaagttgatccgagttagttaatattacaatttctttagtatatctattacgactacgatagttatatagatatccgccttgtaaaatacgagattgaacctttgcgtctgctatattgagcatcgtttcatattcgtttttatctggaataataatattacaatgtcgtttcatatcacctttacacatcaattgcatatttcccgggacattaccattacagtgttcttgccataccaaaacatcactaccttttgatggcaaattatataacactgaaaatggtagggctagtgagttaataacgaaatgatgttccgtaatttcaagttgcttgataaaaaataatacgaatgcgagctttgaagggaaaaagtaagacttcccttgccaatccaatatgacatcagatgttacaaaattttcataaatcacttctttaccttctgctgtcatatatttcttcaagatcgctttacgatttaaatcgtaaacagtttgtgcaaatttaataccattcttagaataataatcgacaaatcggacacgttgttggtcatcaaaccattcgacacgactaacaattctagggcgctctccactttgataaaatattttgcctcgtagacgtcccatatcattaattgtagccgaattgttgttacctttaatttcccaaaaagctggtacagtaacctgattaaaaaatcgtggtttcatattttctgtattatgattatctgcaaaaaattgatacggtgatataacatcgtccggtaaaaagccattgtcattgagtacaattgttaaatcttcttccaacttactggctttaaaagactcatataactttcgtgaatgatcgttaaagtaatcaaataatttaatcatgtagcacctcttgaactaatgtttcccattttaaaataatatcttgagtcataaattgctgtgccacttcataagagatgtcatgtggtgcctggggaccattgttaaaatacattacaatggcatgagctagttttgcgataacatcatccacactatcttcgtcggtatcaaaaggtaccaagtagccattttccccatctcgaataaaggttgggttaccataattcacatttaatccaatcatacctagtcctgagcctaccgcttccattagtgttaacccaaaaccttcgctagttgatgcagaaagaaataactcataatcattataaatttcatcaagtttaacatgccctagtaaacgaatataatcttgtgcgcggtgtgtatcaataattttacgcagtcgcgtcttctcgctaccttctccataaatatcaaatgttaattctggcacttgtcgtttagccacgataaccgctttgacaagccaatcaatatgtttctcatttgctaaacgagatgcactaatcatcgcatatggctttcttgataatttaggatatgataacgcatcaatgcttcccaccggaatagtatagacacgtggacgataaccttgatattgctcaaattgtcgacaaaccatatgattttgaatatctgttgctgtaataaagaaatcaatgtatttagcttttgaaaattgatattcataataattgttccatagtatatgctgctcgctcatcatattattactataatgatcagcatgaatcacaacaccaactttactatcacctttatgctgcaaaacagcctgaccaatatcagaagcgcggtctaatatgacaatatcgtctcgggttaaattcaatcgttgtaaaaagtatgcaataaattccgttttgttatacaacaccgcatcttcaaacacatatatatagctgtctccatcaatatattcgttataagcgatggaaccatcttcattatagaattgtcgcatatataatttcgctttattatcagctggtgcataatactcagaaaatatacgcgtataactataaaaatctttacgtactaacatactattaattacaaattctgcacgatccacaacatctttttgttcattttgtagataacatgttacaaatgatgatttcccattaaaatatagacggactatcttaccatttctttctctaaaactaatttcatgaccaagctcacgttcaatgtcatctaacgtgtacgttgttggtgctatagaaatatcactaaaatactgatacaaccaaataacttcttgatctttaaacccaatgttttgcgttaatgtctgtatgttctctgactgtataaaatctaaaaacacaaatttagtgtcttgatttgtacgtctcaataatttagcacggtaagcttgtgcatattcaacaccgctactcgcccagcctataccaaagtttatattatatattgtcatgcgctaccccttttcatttatggaaaatgtataactggcataccctctttatcaaatgtaatcatgctttgacaaatatttttcaccattctttttttgatatttcgtgtcataacttcaaatgaatctaatgcaactctatggtattcaaaaatagcgttacgttgcccattttgtcgttgattaacgcttgcttttaattgttgtaaatagtcgacttgttctaaccaacatgaatcaattgctttcaaaaagactttttgaacgaaaatattataataatatgcactttgcatgtttttacgattcaaagctaattgcttttcaaattgctctaataaaaatgtcactactgcttgcttatctttaaaattaacacaagccacatctttattaaattggaaacttaaattttgataaatatactcgacaacacgcgattttgttagcaccttttcctcatttacaaacatttcaaatacatctttagctaacgctttaaaatctcgattctcagcatcatctatttctaaaactcgattgcgttcctcgtatacaagatctcgctgtatactaatgcttttttcaaattcattagccatttcacgagctttaaccccttgttcttccgagatacgctgcgctttaactacaatttgcttaactttgcgattaaacaaattactttgcgataatcgttgtgcatctaatgaatataattgattattttccgctaaattactatcgctccatcgcttaactaaataatcatctagtgaaatatatatacaagatgatcccggatccccttgtctaccagaacgaccacgtaattgcctgtctacacggctattttccatatgttcatgaataataacagctaatccacctaatgcttcgacaccttcaccaagtttaatatctgtgcctcgacctgccatactagtcgcaacagtcatggaaccaatttgccctgcttcagctatcatctgcgcttcttttgcaacattttgcgcaatgagtaaattattaggaatatccatttggaataatactttcgaaaagtattcagccgcttcagcagttctcgttatgagtaaaaccggtcgccccgtttcatgaagttcaactatatcatgaatcatcgcgatgtttttctcatcaactgaacgaaacactttatctggttcatcgatacgttgaatcgctttatcagttggtgcttgtacgactatttttgaatacaaatcaaagaactctgattcgcctaattttcctgtagctgtcatacctgaaaatgattcaaaaagtttaaataaattctggaaggtaattgttgccataacacttttatctgttgaaacctccataccttctttcgcttcaatagcttggtgaagtccagcttgcaacttagttcccggtaacatacgacctgtaatacggtcaattaaaacaatatcaccattatatacaaagtaatcgacattagattcaaacaaatattgtgcgcgcagtgctaaattaatattacgcactaggaccatcgcttgttcgctatataaatcttcaacattaaagtatgattgtgccgcttcaataccttgatttaacagccatatttcttttttggtcttcttcattttaaaatgcacgtcttcaatcaatgtatctacaaactctttcacaatatgaaatagatttgattgtaatcttggtgcacccgaaataactaatggtgtttgagcagcatctaaaatgattgaatccacttcatcaataataccgtaatttaattgtggtaaaaatttcccttccgcactatcagccaaattatcaattaaataatcaaaaccgagacgtccattagttgtatatataatatcatgttcatatatattacgtttttcccctttttgatactcataatccacaatatcaacaaaacctaatgaagcagttaaacctaaccattcatataatggttgcatctcttcaaaatctcgcttcgctaaataatcattcgttgtaattaaatatgttccttttcccgaaagagcatttaaatataaaggcatcgttgccgttaatgttttaccttcgcctgtttgcatctccgcaatgttaccttcatgcaatacaatcgctccgattaactgaacttctttaggatacatacctaatactctccagctcgcttcacgtgccactgcataagcttcaggtaacaatgtatctagtgtatcaactcctgatgctaaacgttctttaaattctattgtcttttgttttaacgcatcatcagaatatgatttaacttcatcgctccatgtattgatgcgtttcactatttttctaatcgactttagtcttaattcgtttatcgtaacatctagtttatgtttcatttacttccccaccattcagtttcgatacatctaagtaatctaaaaatcgtactggattcattaaacgtgacatataatttagatggttgtcttgctcttctttaaaataaaactcgacatttgtatcttttagttcattatttcctgggacatgttctgtaagccattcttttaaatcatcatcttcatggcttgtacgatatactttgcaatctaaatgctgagcgacataagttgcaaaaacatttgactttgacccataactaatcaaattaatagccgttagggtatcttgactttgcaaatcatcctttagttgcttaatattttccttgatatcgtcgtccatccaacgttcaacgagccaaacatgaccaaacagtttcaaaaaatcattcgaaatagttggataggtgtcagatggttctgcaataatgacattgatcctatcatttccatattggttatcgtctatcttcgtcacccgcatgcttttatactctaaatcatcttgatgcgtcatctctgtaattgttaaacatctaaatattagactcgtcgatgctgcattcatcatttttattttataagcataggcttcatcaggatattgaatcgtaatactatttgactttacaatctcagtacttagttttgtgccatttttattataaaaaatgatgataaaatacactgaaccagcaggcgttgcatcaaaatcaaaatgcaatttataatgctgtcctctacgcaaaattggtaaacttggcgcacttttatattttgaaaattgctttaacatcaaccactcatgaatcggtaatccagagggcatcaaaggatttataaaagtcacttcaccatttgaaaatgatactttagagccatacataaatgtagtttgtgaaatataattccaagtaactttaaatgttttgtttttcagcatgttgaactctcccaaacttgtcttccaaaataatgttgtaaaaattaacaaaccaacttgcaatggtaggtgaatcatcattatgtcgcccaggaatactgcgattcatcactcttgcttggtgtgctgtcaatacaggtaatagctcttgaaatgcatgtggatcataatcatcatgttgcatatatgctatggcaaaaacagtttgtgacaatgatttcttttgaaatgtttgccaaaatttttgatttaatgcctttatcgacgcttgagatgtatcaccttcattagacaccaggacgtctaatgctgtaccgaactcttctggtctaagtaatcgcatatgttcagcaatcgttccaatattaacaagtggtttaccaacaataattgcctgaggatttaactgagcaccataatacaaggcaccaaatgaacccatagataaaccagataatattaattcatgtgatttaaaattcagcttttctaatgtctcgtcaataacattgataataccttgttcatattcagatgaaccgatataaaagctaccaccttcaacacgaggatcgccgataagtaaaaacggtgcattcatacgtttcatcatataatatccttcgaaaccttccgctgttcgataaccactaaaatatacgtttagtggcggtttcatatcaccagggtggaaataataaataaattcctgtcgttgactatctacgaaacgactaccaccaagtaaaaattgacccatgtctaatctagaccatcgtttgtgtataggtcctaaatgtaccgtcccgttcccacgcgccttaacagttacacttatataagcatcaaatggtttcgcaggtatctctaaaggactgtctaacatatcatcagttaatatgatttgttcaattaatgcaccatcagcgccagtctgaatcaatctaaatgtatattgcaactcgaccgcaccatcaatatcaaattctggccatatttgaatgactttatctttatcgtaaacgagattattttgccaagatgcgataggtttaaattcttttccaaattctccactcaacgtgagctctgaattaccttggtatacgacatctactttaaaattcggatgcacaagtgctaacttaggggaaactttatctccatactgtcctgagaagctaactgcctctaatttattattacgttcttcaatattccggtaatgtaatggttgaacaacgtatttttggacattttcgtcttgttcatattcaactgaccaaaatgattcatcaacatacgtattgtatggttcgcttatcatttgtaataaattcgttaatgtctccgagtatggtgcttgaatatagataaaatcaaagcgcccttctgcttcaacaatcgcttcaatagcctctacataaccactatcaaattcaaacaatccaatatcgaagtaatcccaactcacaccttttttgtgttgaaaaataggttctaaatcgtctcctccaatttgcaaaactctaaatttacgtggcatcattttcaccttctattaactcatcgagctgattaataatattcttagaagcatatgcatctattaattttaaagaataggcgtacgcataattccaatttttcaaataaaataaataataatttaacgcatcatctaattcatcaactgtatttataatacggccattgtcataatcagagacgtaatctgtttgttgaccattaatttgtggaatcccagcgctaattgcactaatttgtaaatacaaatcaggttcttttgacatatctatcacaagtcgcaacgtccgcaatgcttctacaacatcatgttcagcatgtatcgtcttaacagcaatgatgtcatcttgatcttcaggtgtcattaatgctgaaacattaacatccgcattctgtttagcttggtattcctcatttaccgacgtaatacattcacgaagccacatcggtatgtcattttgatggcgcgataataaaattaaacggtaataatcttcctgtgcgatataatccacaagtcgttgcatcatttgttgcaaatcagcgtcactcataccatctatccatacacctataaatgtttccatcaattgactacttatattaggtgattgtctcgtttcaaatggtgtgattcgaatcattgtattctcccgctgatacttctcttgatgactaattaaatcacgttctagttgcacactatcaacaattaaatgggcattctttacgatagattgatattcctcatctgacacagtttcatttctatttttaaaaaatgaataacttaacaatttcgctggaatatgattggctatttgtcgattgtgcctagcatctgaagccacaatcacatgatcatcttcatgtatttgttgtgcaatcattgcttgaaatttttcttcaattagttgagccatattgttatattctgtttgttgatagtgatgttgatatctttttgatacagtgactctgccatttttcaaatcttcatgaagtacacaatctccattaatcgttaaatattgttggtaagaagcctctccctgatcatcaaaataacgtatcgctgataaataacctctgtcatcaaaaatataacgccgttgtaactgatctctttcaaattcttcaaaccaaattgaatacccttcttgactaaaataaatatttgtataggtctgttcactcgtcacacattttaataaatacggcgtgtacacaaactcaacatcatccggccattttaagtgatgataattaatcgcttgtggcgcatggtgactgaatccttgaatttcatcaaacacagacgaatactttgtttcatataagtcatatcgatgtaaaaatgttcttaaatttggtgcatgattgagaacaatcagttgataatctaagtcattttcaaggtgcattcccattaaactaatcatatcgtcaaattccgtcttattttgtagttgataatacggcacagtcgtgtcttgccaccatcgttggtcatcgtaccaagctggaataaagtatttcataattacctccttaccaatactggtttaaaaatggcttatatttatcaaaatataaatatgtacgaattgtttctgcaatattaatactgatgtaaactaatacaatcagttgtactgagaaataaatttcagtagataaatgcggtacaaacaatgtgaaataaagcggtataccaataatgactgtaactaatgccgatccaaaccaacatacgcgtcttgcttgataatttaaataacgttctgtatccttaccaggtttaactcctgaaaaataattgccactctttaagaaatctttggatttttgtttagtattgattaaaaatctcgataaaaaataacccaataacatttgaatcactaaatatactgaaatacctactggactatcaaatgtcagcattggcatgtcatctgatatgcttttattaaacatagataaaataaaatgaatgccacttttcaagaaaacaaatgctgaaatactcatcattaaagtaatactgcctgcagggttaactttccaagataaataagatttcatatttgttgcggaaacgttcattaaatcgatatatggtattctcacttctactaattcaatgaataataagataaacaatgtgattatcacaaggatgattaacaacgcaatcacaatatgacttgcatctatatattccattttttgatgcatcattgatttaataatgctaaccattacaatcggcattggtcctgcgatgccgtaacgactatttttgtcagctaaccaaactaataacatcgttccagtaaccaaaatcaatattgttaagtaaatattgtcttgatgaacacgttctttcgaaacatattcatgaatcacaaaataactttgaatcacacttaaaattaatgttaagatacgctctttataatgcttctcaagacttgtttgtttcatgtatttatccatattccgataagaaatcagcatcaagataatcattgatgttaaccacggaactaatcctaaagtgaaaatgtttaaagtattaacgtctccacccatattagaaatagctattttaaaaaatgactcatgttttacttgcatatcgttataggaaacgatggaaatgtttgtacctaatatataaataaataatataaaacatgtgtatagcatacgtttatatataattttatattcgtattgttgtaaaagttttaacatgttgcacctcttttatatcaaaaacattaaaaagactaagggttcatcactaattattaaaatcctatatcgatttttctagtgattggtgcctcagtctttttaattttagccagctataaattcaatttatgcttgagaatcatcttgatcattttcatctttctttttctttctcttcattaaacctaaaccaactaataatgtcataacgccacctagtaatccattttgttttattgagtcacctgtatctggcaatcttttttcactttgtgcaggcgtgccattatgtttagtcacttcagatgttgcacttaatgtagactgagattcactcgtgctcgttgttgcttcacttgataagcgagatgtgctcgtgctgtgagtatgatgcatactcattgagtctgacggatgcattgagttagattcagatgtacttgttgagccggacatacttgttgatgttgagtcagaaatgctttgtgaaccagacatagatgtactcagcgattcggatgtgcttgtcgaatcggatgtgctcaatgacgttgatgtgcttgttgacactgattctgagtcgctaattgatgttgagtcggatttgtcttgtgacattgaaacacttgttgaatcggattcactcattgatgttgagtcagatacgctcgttgaacctgaaccagacgtacttaatgattcagatatgcttgttgaagttgaaccacttgttgagtccgatgtacttgtcgatgtcgagtctgaatctgatgtactcaatgattctgagtcactgatagaagttgaatcacttgtagattctgattctactgtactttgtgaaccactgatacttattgaagtagaatcactgatactgtctgatgttgataatgatgtcgacaccgatgtgctttgtgatgacgatgtactagcactcattgacattgatgttgatatcgatgtacttaaggaaccagatgcacttgtacttgttgactggctttgtgacattgaatcacttaatgatgtagatgtgcttgttgagctcgagtcacttacacttgttgaacctgatattgagtcacttaaacttgtcgatgttgaaactgatacgcttccgctcattgagtcagatgttgaaagtgatgtactcgttgaatttgatccactgatgttagacgaatcacttgtagacattgagtcgctttctgatgcactgatgctcatagagtcaaattgactattacttgttgagcttgactgcgaatcgctcacacttgttgacgttgattctgatccactcatactttgcgagctactcaatgattttgaatcacttaatgaatccgaagtgctaagacttgtggaaccacttaaagatattgatccacttaatgagtcggagtcacttgtactagtagaatcactcattgatattgaatcacttagcgaggtagactcgcttacgctttctgaaccacttaatgatgttgaggtactcaatgaaccagatgtacttgttgaagtcgaaccacttgttgattttgaatcacttaatgaatcagattcactcacgctttctgaacttcttagtgacgtcgatacacttaatgatgacgaatcgcttgtgcttactgaatcgctcatcgattgtgagccactcaatgaacttgactcgcttacactttctgattttcttaatgacgttgagacgctcaatgagccagaatcactgacacttgttgagccactcatcgatttagagtcactttcagaattagattcacttacactttctgaatcatttacagattctgacatactttgtgaatcagatatgcttgcgctcattacttcactagccgatgttgatgtacttgtcgaatcacttaacgatatagatacactcatcgaaccagatgtactcgcacttgttgagtctgatgttgaatcactcacactatcagataatgacgttgaatcactcatacttgttgatgtacttgttgaaagcgacatactttgtgaatcactagtacttgtacgcatcgaagtactagttgaagctgatgtactacgagagtcacttgttgatgttgatgtacttgctgatcctgatgcacttgtacttcttgatgtgctttgtgaatcgcttaatgatgttgatgttgaatcggattcacttgtactttctgatgttgagccagattctgatgtacttaccgatgttgataaacttgcaatggtcgacatgcggtttgaagttgatgtacttagcgaatcacttaatgatgctgatgtgctttgtgaatcggattcactgctttgcattgacgcagatgttgaatcacttaaagatgttgacgacgaatcggattcacttgcgcttgctgagttactgagcgatgttgacgtacttgctgatcctgagttacttgtacttgttgagtcactgagtgatgttgacgcactttctgatgttgattcacttgcacttgttgagatactttgtgaatcagattcactctctgaaccacttaatgatgctgatgtgcttgttgaacctgattggctcgtacttttagatatacttgttgaatcgcttagtgacgttgatgtcgatgttgattcactttggcttgttgactgacttgtatatgttgatgtgctttgtgaatcggattcgctcgtgcttgtacttgttgagtttgaggcactttggcttgctgagtttgagtctactccgctttgattcattgatgcacttagtgacaatgacgtactcgttgagtcagacaaacttgtactcgttgacgtacttgtacttcctgatgttgattgagacatacttatgctcattgatgttgaatcggatttactttcacttgatgatgttgagtcggattcactttcacttgtagaaccacttaatgatgtagatgtactaatggaatcagatttacttgtactgattgaatcacttgtcgacattgatgtacttaatgaatcagacttactatcacttgtggaatcacttaatgatgttgacaaacttgtagagttagacaaacttgtactcgttgacatactcagtgatgttgaaacactctcgctcttaaacgttgacgttgattcactgatacttgtcgatgttgaaatggacgcactaccacttgttgaattacttaatgatgttgatgtgctaccagattctgatgtactgtctgataatgacgtactctcacttgtcgaactactcactgactctgatgttgattcagacgtactttcacttaatgattcacttaaaaaggcagatgcactttgtgattctgaatcgctagtactatttgattcacttaatgatatagacgtgctctctgaagcagatattgcttcacttatagaatcgctcgttgacgttgattcacttattgaatcagactctgatgtacttaagcttgtggaatcactcacagatgttgatgtacgttctgaattacttgtacttaacgatgtcgaagtacttaccgaaccagatgtgctcgtagaagcactttgtgatattgattcacttgatgcagttgatgctgatttgctatcactcgttgaatcactaaacgacgttgatatgctcattgaatcggattgacttgcactcattgaaccagacgtactttgcgattccgaagtacgtactgaagcacttgtcgacgttgatgtacttgttgaacctgattgactagtacttagtgataatgacttactatcagaatcagatgtactttgtgaatcacttaatgattctgatgtactacctgactgagacgtgctcattgaactacttacagacattgatttactgtctgatgcagataatgacccacttgtactgatagagtcacttactatctctgaagtactcatcgagtctgatgtacttgttgagacactttgtgatgctgctatgcttagtgatccagaaacagaaccacttgtgctcgtcgaatcgctcaatgattctgatgtactcatcgattttgaatcacttgtacttaatgatattgatgtactttgtgaatctgatttgcttgttgacgcactttgagagttggctatgctatttgaaatactgatagagtccgaggtgctagctgactcgctcaatgatgttgatgtactaattgcattcgatgtactgtcacttaatgatgctgatgtactagacgaccctgatatactcgttgataagctttgtgacttagacaagcttcctgatgtactcatacttaatgagtcactgagtgatgttgatgtacgcaatgaatcagatgtacttgttgatagactttcggatttttcagtactgttagagttcgaaatcgaatcgcttaatgatgttgatttactaactgaacctgacatgcttgatgatacactttgtgaattcactaaacttgtgcttgttgagcttgatacactattactttcagatgtgcttaatgacttagatgcactcacagaatcagataggcttacacttgtcgatttcgaggtactagctgatgtagataccacaatcgatcctgatgtactcgttgatgcactttgtgagtcagctttacttgttgagacactttgagattgttgtgtacttcctgatgttgatacggaatcactcatgctatttcttgttacttcatatttaaaagttgtcgtcgttttgttaccgctcgcatctgtagaaacgattgatatagtacttgtaccaatgtttgttggtgtaccactaatagtattatttgtactatcaaatgttagtccggatggcaatccagtcactgtattcgtcaccgcatttccactgttatcttgcgtagcaattttaatcggggatattggtgaatacacttctgatgattgatctcctattggtgtcactgttggtgctgtcgtatccacaacatttattgtaaaagttgtcgtcgatttgttatttgcttggtcagtagacacaactgtcactgttgattgaccaatttttgttggtgtcccaatgattgaattcgttgcactatcgtaacttaatccgcttggtaatcctgtaactgtatttgtcacagtcccagtaccattatccgttgtagtcaacacaacaggattcattgttttacccacttctatggtttgattgcctacagttacagttggtgcttttacatcagtaaaataatatgtcactgattgtccagcattcgtcatttttacagttttatttgtatcattataagttgacgcatatgaactatcgacggacgtgtagttatatcctttagcagtcaatgcagattgctgattatcgattgtcacgacttgatcaacatttcctgaatatgtttttggtggaataatatctttacctgttgttacatcaacgtatctcacttgtgtaacagcagactctgtatattcgaatgttccaaattgtacttgttgtaaatttgtcgcgccacctgttgaggctgtcattgataatgaaaagttggtcgtaccacttttcgcaatccaatctgaaatattacgtgtccatgtttgacctgcatatttgacagtcataacctttgtatcaccattatagttaatatcaaaatcttggaacgtgttatttgtaggttgaacatttaacttcgcagcattatcagctgttgaacttgatgtatacgttgttgcaacaccataactatctgttgttacaaatgcaccaaacgcacctccaccagctacattagatgggtcagcattcgcctttgcagctgaatttggtttagatgtattgtgatacgtatccaatttgaagccaaatgcgttacttaagccaccaatacctactgcggcaccgtttaaccctgtttcacctaatacacctggtgaaaaggcaaaaccgataccatctccaccatttccatgcccttcatatttgttacctaaatttacttttccagaaaaatgaaaactcttattagagtcaatacgtgttcctaatgtaatagcacctttttggctgtatgcatcctgtgttaacgtcacaataccggtactttgatcataggtagcattacctgacgttgtcatatattgttttaagttatctttattaactgtaattgtattagcagttactgcggttgtcgtcgctgctgacgcaaatgttgacatagctaagcgactgaaagttcgaagttttactggtgcggtgctagttgacgttgtgctagttttgtttaagttgaccgaagatggcgttgtgctttgtgaagtgttatttgatgcagtactttgatttgttgatgtattaattggttgttctgtacttgaagttgaagctacagatttagtatcagaacttgatgtagtattctttgaggatgttgattctgatgtagatgtcaatttctcttgttgattgcttgtactattagttgtcgaagtgaccttttcagacttttcacttgagactgtgtcactatttgatgtttgtaccgaactactatttttcgttacacttgtggaatcggctgttgatgttgatgcttcgattgtcgttgagttttgattacctactgtttcactttgtgtgtttaattcagaagttaatggtgcatcagaagccgcaaaagcttgctggtcatgcaacatatttaccgtgaatgcaccaccaataaccgccgtagttttcagtccgtatcccgtcatttttttactaatgctttgattatcttgactcactaaactatgactaataaatggtagccccataattttgaacatttctatttctttaattccggattttacccaattttttccagatttataaagtcttactcttgttttttcgtttgctaagctgtcatgaaatgctttctgtcttttactcatgtaataactccttgtattatctttacattcattagattataatatatgccactattcaatttaatacaactcttttttgatacaaaaatactcattttgttaaaatttgtaaaaattcatttttattcgtctagatggaatcgttttcatatttttaaaattactttttctcgtttatgcgtataatcttttttatataaatttggctaattggctttatgtttaatcattataattgtttcgtttttaaaataattattgtattaatatatctatatcatccaccttttatttataaatagttaatttacaactaaacgataaatattatatgcaaaatacatctttaatattaaagtaataccaatattttttcaataaacctagtgtaatatatgtgtaattctaaaagattcttctttaaaaatataaataccacgacatattgctttaacattttcatttataaagcgaaaaaatgcatcgctactaagttgaatatttagtaacaatgcattgaattcactaaaatgattaaattacttatctcttttcatctgattgattatcgaaatttcttccttctaaacctgctaactcttctttagaagctgcaggtgctttcatttcaaatatctcattcactactgtgtaatcgtaatatcctaatctggcaataggtttaatcgacttaatgtccaatttaccattatcaagaataaccttatcgtcaatatgaacttgggcaactcttcctataacaatatctacggtagatactgggtctcctgtcggaatacgaatcgtttgaacgtactcacattcaaaatgtactggcgattctttgactcgataacctggtgcttctatacatgcttctttcgtcacacctgcatattcaaattcatcctcttcaggtggtagtgccttcgacgataaattaacagcttctcttaaatcatacgtggccatgttccatacaaaccaccctgtctcttctgcattttttactgtatctttacgctcatgatcaccaagaacagattgatttgctgcgaacataaccataggcggatcccaagttaagttttgatactgactataaggcgctaaattatctttcccatctttcgatacagtagaaatccaacctattggacgaggtactgtactacttttaaatgggtcgtgcggtaaaccatgacttcttacaccttgttttggcgaataattcatactatcttcaccccttataagtaattacatttaaggttacgccctctttacataagcgtctaatataaataaacaatttatttataagtagaaactatatatgacgtggttgcttataatttgcgttcttgattcgaaaaattcagataaggatttatacaattaatatttatgatatcttttgtaaatttaattaattatagttacttcaatcatgattagtttataataataaagtgaaattgaaaaagacagctattatgcgatgagcgaaaaacttcaagtaaaacaagaatttaacggcgttacaaggcaatacttgaatttcagaacagatagtatcgatgatctggataagttcaaaaaagaattcaaacctgttatgcacttaaaaggtgatgcattcaatcaacagttacaatctttgattaacaaatatccacaaatacaaaaaaatatgaaatcagagttcattgcttattatgataaagaaaaaaatagagaaacagtaaaaaactatgcttggaaccttcaaaaatctataaatgacattatgcaatcatatcctagcacaaaatttgtacagttttataaagatgatgtttccccgtcaatggtagatggaaatggccgtttaaaatcggatactaatgtaatttccatcgagggaggaaagtatgatgagaacaaataatcatataaccgatttagatgctattgagttaagtagcggttggaattacaattcgaaattggtgactggcaaaaatgcactactatcagatagtcttttaagagatattaaagtattaagttctaatgctaaaggcgacgctgacatactagaaacagaacttcgtgctgtaataaacgcaatgtctcaaaacgaaggtaaatctgttgatgcacttaaaaatagtaccacttctctaaaaaacaatctaaccaaattaaaagagcaactcgacaaaactacacattaatttcatacattttgagtgaacagaattatatttccatagcaaacattcctaaactacacatacgttacataattgattcatttttatagaaacgggtaaaaatgataaagtaatcatctttcacaaaaatccaaagattgggaggaattaaatatgattttgcgttacgcaacaaatttaaaacttgcgaaagagctataccaagccagtaaacctaaattgcaagaagataagggtatgattgaactgtttgaacatacttttggcttgcaaaaagaacttgtaaaatacgtcggcattgcagaagcaactactgctgctttatactcagctagctttatcaataaaaacatttctcgccttgcatcactatcaacgataggcattttaagtgtagctgcttacaaacatttcgaagctggccaaggtaaaaaaggtgcacaacatgcattagatttattaggtcttgctactttaagtttactagatacattttcttgtaataaaaaatagtcttcattttagaagcacatactttagcacctgtgtacttttgattcaatccataaacggtacaccgctatagcatgtgttttattatttttctggtctctttatcgtaaatattccccctaatttagcataatcatttccggctaaacgagaaacagcctgtaatgcgtgtggattgattttaaaatcaccctcataaatactgtcatcaatatgataagttacaatttcacctattattaaatcagccccatctaatacatctccaagcaatatcatttgcgatagtttacattcgaatctcattttcgcgtctttaattcctggcgtcttaatcgttgtagatgttaaaagtgataatcctgtacgactcaactcactgtcaccatatgctaacggcgctgcagtctcattaatatcttgaacattatcttcgtctgtaatatgcacaacaaagtctccagtccgttctatattcaaggcagtatcttttctcttacctcctgcacgttgaactgcaatagcaaccattggcggatggttattaacaatattaaaaaagctaaatggtgctgcatttactgatgcatcttgatttaatgttgtaacaaatgctataggtcgtggaataattgaaccaattaataatttatagttttctctagcagttaatgattgtgcatcaaacgtatacataatacctacctcttttcttagtatatctaggtatttctccgattttggttaatttaaacatctattctcctctgaaaatcacttgtatttatttagcaaatcttttgaaatatgacacatatgcatatcttctggatatttttctaaatgttgctgatgttcttcagcacttttaatgtagttagacagcggtaagacttccactgcaatttgatctctgtctttacgtcgttcaatgaactgacgcgcttcaattaagtggtcatctacacaactatataaacccgttcgatacttttctccaatatcatttccttgttgattcacactgtaaggatcaatgatttcaaataaataattcataatgtctgtaattgttaacatacgatcatcgaaatgaagtttgacacattcagcataaccatcatacggaccgtctaatttagagcttcttccatttgctcttcctgcttctgtatgtataattccaggtattgttgcaaaaaatgcttcaacaccccatagacaccctcctgctacataaacaactaccatatttacacctcatcatccttttttatatttttaacaaggttataccatttaataccgccatgacatgattctgatacaccttcattacgatacccatatttttcataaaatgaaattaatgattctcgacatgttaacgttacaccatgtcgatgatgattcttagcaagagtttcaaaatagtttagtaagcgacctgcaataccctgaccttgataatttggtgctacaacaagacctaacacactaatatagccaccttcactattatttatggagacatttttaaataaatcatcgctaatgtaacgctcttttatgactggaccgttgatgtatccaattacttcatcattcttttcagctacaataaaagtttcttgaatttgttcaattctcaatttcaatgcctctcgtgttgcagcttcttccggtgaaaaaccaatattttcaagtgcaataatttgatctaagtcctgcatgattacttttcttaataccataaaaacacttccttagccctatatatcaaaagtaataccttcatctttatattcattattttcaaactaccttcactataaaaaacgagtctttttattgaaagccattcgccttaatcaattagacaagttgtattatacgaattagtaaataatcatgattataattcattttaagcatactcaaaaagactggtacatgtataccagtctaattcgaaaaaatatatttagttaaaaccatttcaaaaacgacttcacttttcctggcttagtcggtctgtctaaataaacaaaattatcattgattactgaactggcatttcgaagtaatgcttcaatatcattcgaatatttcttcaatttatgattgtgaaataattcttgcatcaaaaatggtctttggtcacatgaatgtgcatctgaagctacaaaatgagccaaattacattctataaattgtaatgataacttttgaatgtttttaccaaatccaccaactaaagaactcgatgttaattgactcaatgccccatttgcaaccaattcatataatatttctggatttttggcgatacttctatttctttcaggatgtgcaatgattggtatgtagcctctcgattgtatttcaaaaaacaattgttttgtataatgtggtacttcgcccgttggaaattcaattaataaatatttcgaacgattaataccttgaatactaccattatctaagcctttcagaatcgaatctgtaattctaatttcttgcccgggaaataatttaatatccaatgcttgaacttctggatgcgttcttaactccgccaatttcacaagcacttgttgaaatgtattatcatatctcggatgcaaatgatgaggtgtcgctacaatacttgttacaccttcatccttagcttgctttaatagtgcaatactcttttcaattgttttaggaccatcatctatatcaactaatatatggttatgaatatcaatcatgattcatcagtcccataatatgcatagtaactagcacttttatctttaggcattctatttaagactacacctaataatttagcacctgttgcttcaataagttcttttccttttttaacttcatctttattattattttccgaattaactacgtagacaacattgccggtaaactttgaaaataattgcgcatctgtaactgtgttcactggtggcgtatcgataatgacaaagttataattcatcaataatgtgtcatacaaatttgcaaatgcccttgatgtaattaactctgacggattcggtgggattggcccagacgtcaagacgtctaaatcttgaatttcagttgagataatactgtcttgataagttgaccaatttagcaataaacttgataggccttcattgtttggcaaattaaaaatataatgctgcgtaggtttacgcatatccccgtctacgattagtgttttataacctgcttgcgcatatgcaactgctaaatttgctgcaattgtagacttacctgcgcctggtgcctctgaagtgattacaatgctttgaactgcactgtcaggatttgcaaacataatatttgatcttatgcctcgaaatttctcgctaataggtgactttggttgttcatggacaattaaacttgatgtacttcttcgtgtattcgtcatggtaattcctcgtaaattaaaatttttgtattgaacctaaaataggtaatcctagttgcgattcaacatcttcttctgtcttaatacgcttatctaataattcttttaagaaaataatcaatattgctaaaacaataccaacaataatgctgatcactaagttgacagatactattggagatacttttacagcattatcatgtgctgaggaaagtatcgtaacattatcaacactcataattttaggcatatcatgtgcaaaaactttagatattctattaacaattttgtcagattcagatttattcccagttgtaactgatacagtaataatctgagagtttgtttgattggttacttttaaaaacgaattcaactcagctgttgaatactgaccatcaaactctctagatactttatctagaattcttggacttttgataatttccgtatatgtattaacagactgcaaactactttgaacattttggaaagctaaatcacttgaggactttttcatgttcactagtatttgagtagaagcagtatatttgtcaggcataacaaagaaggttaatgccgtacttactacaagacatattgccggtaaaataagcaataatttaatattcttctttagaatatttaatagttttactaaatcaaacttttctttcatggtttcctccacataatcaatcattgtattcattatgtatgttttataaatcggacaattatatctagtttaacgaccacaaaacatacacaactacattttctctaattatttatataaatattttatcgtttaaaattatatcatgattctctaccgttatgtataacttatttatatttttttacaagatataatattgtccaacttcaaatatccaaacctattaataataaaactagataccatcgtactctatcatggctttcttataatcgagtagaagcatcatcattacttgattatttgctctttacaacaccgagcgtgcccgtactcggtaattcaataccttgcctaacccgtcactgtgagttgggttaatgataataaagcccacaccttttaaaaagatgtgggtaatttatataatttttatttacatttttaacttataaaaaaaagcgcctatgtcatgatttaccatcacataggcgcttatcaataaattattacttattactttccatttcatctaatttatgcggatttcctgtaattagatgacaacttattcttttcagggtaacattacacttttataatatgttcaaagacaaacttaaccattcacaaatataaagaataatattataaaatcattgaacaaatcgtattttgcaacaattgatatttatattaatgtattgcatttaatttataaaattcatatacatcttaatattctcaatatcgatttgtattgtcaactttatatagatttaaaaaaataatctcatgtctttttttacaaaagtaagttaattattacaaactagtaacaaaaattatttcttcaaaaatatatttagtagcgaatacacttcatctttgaattgacttttactttcttccactgctccaaatttttgcgaaaaggatgctttcaaataccaactttcaagaaacagcaatattaaattctgaaagtcttcttttgtcatctttatctttgattcatcatagaattttgctatctctttacttaatgattgatttaaatcttgtatttgtccgtaaatatttccagaaaattcctcaggcgtattagataattgaacgtacattctaatatacctttcttcgatgtcgaaaataaactcaaataagaattgatataaagcatcaattgaatagttcgatttattttgattcatcataataatattattaaggtaatcaaaacagcatttaacactttgttcgtaaatactttttttcgagtcaaaatggtaatataaactcgctttctttatatttacacttttagctatatcatcaagtgttgtaccgtcataccccttctctgaaaataaggttattgcgttatcaataatcttatccttcaatttttataaccccctactgaaaattaatcacactatgttacaggaaaattaagttgcaattacaaatatttccgtttaattataacaacaatctattgcaaattaaaatactatcaattaccatatggcttacaacctaactaacgaaaggtaggtaaagaaattgcaattttttaactttttgcttttttatcctgtatttatgtctatttactggattgtcggttcaatttatttctattttaccagagaaattagatattcattgaacaagaagcctgacataaatgtggatgaattagaaggcattacatttttacttgcctgttataacgaaagtgaaacgattgaagatacgttgtctaatgttcttgcactcaaatacgagaagaaagaaattattatcattaatgatggaagttcagataatacagcagaactcatctataaaatcaaagaaaataatgactttattttcgtcgatttacaagaaaacagaggtaaagccaacgcactcaatcaaggcattaaacaggcttcatatgattatgtaatgtgcttggatgcagatactatcgttgatcaagatgcaccatattatatgattgagaatttcaaacatgatccaaaacttggtgcagttacaggtaatcctagaattcgaaataagagttctattttaggtaaaattcaaacgatagaatatgcaagtttaattggctgtattaagcgaagtcagacacttgctggcgcagtcaatactatttcgggtgtcttcactctatttaaaaaaagtgcagttgtcgacgttggctactgggatactgatatgattaccgaagatattgcagtttcttggaaattgcatttacgtggatatcgtattaagtatgaaccgcttgccatgtgttggatgttggttccagaaacattgggaggtctttggaagcaacgcgtgagatgggctcaagggggacacgaagtattactacgagacttttttagcacaatgaaaacgaaaaggtttcctttatatattttgatgtttgagcaaatcatctcaattttatgggtatatatagtgcttctatatttaggctatttgttcataacagcaaacttcttagactatacatttatgacatatagtttttcaatatttctactatcatcatttactatgacttttataaacgttattcaatttacagtcgcactctttattgatagtcgctacgagaaaaagaatatggctggactcatatttgtaagttggtatccgacagtatactggattattaacgcagcagtagttcttgtcgcatttccaaaagcattaaaacgtaagaaaggtggttacgcaacatggtcaagcccagacagagggaatacccaacgctaaaatcatcgctaaatattgtaagagaaacagcacttatcgctatatcgtgtgtcttttggatatattgtttagttgttctactcgtttatattggtactatatttgaaattcatgacgaaagtatcaatacaatacgtgttgctttaaacattgaaaatactgaaattttagatatatttgaaactatgggcattttcgcgattatcatttttgtattttttacaattagcatattgattcaaaaatggcagagaggaagagaatcgtgaagtatagaaaattaataattttagtgttgagtatcttgatcatattgcctgtaagcacactggatggtcatcatattgcaaatgcagatgacgattcacctaaaaaactgaaatataaagaaaatagtgctctggcattaaattatcaccgtgtaagaaaagcgaattttctgaataattttatttacttcttttctagtagtaaagaaattaaaaattatagtgttagtcaatcacaatttgaatctcaaataaaatggctaaaatcacatgatgctaaatttttaaccttgaaagaatttttatattacaagaaaaaaggtaagtttccaaaacgaagtgtatggattaactttgatgatatggatgaaactatttatgaaaatgcttatccaatcttaaaaaaatataaaataccggcaactgggtttattatcacaggtcatgttggggaagaaaactttcacaacctcgatatgattagtaaaaaagaactaaaagaaatgtataaaactgggttatgggaattggaaacacatacccacgatttgcataacttatctaaaaataataagtcaaaattaatgaaagcttctgaagctacaatcataaaagatttaaacaaaagtgaaaaatatctaactaaaaactttaaaaagtcgcagaaaactatagcctatccttatggcttgatgaatgacgataaattaccggtaatcaaaaaagctgggttaaaatacggtttttcattagaggaaaaagcagtcactccgaactccaatgattattacatccctagaatattaattagtgatgatgcttttgagcatttaattaagagatgggacggattccatgaaaaagattagacttgaactcgtatatttacgtgctattatatgtgcaattattattatcacacatttacttacacaaattactttaaaacatgaaaatatggagggaggatccttagtattacaattttacattcgtaatattgtgatttttggtacaccttgctttattatcttgtcacagttactgacaaccttgaattaccaaaaagtcacctatagatacttaactacacgcgtaaaatatatacttattccttacatattaatgggattgttttacagttatagtgaatcattattaacagattcaagtttcaataaacaattcattgaaaatgtcctattaggtcaatggtatggctattttatcgttgttatcatgcaattctttattttgagttatatcatttttaaaattaactataacctattcaacagtaaaatattattattgttatcttttattttacagcaatcatttttatattactttacgaacaacacagcgtttcacgataccgtgctacactattatccattaagtgaaaacactataatattcggatggattttttatttctttttaggtgcatatatgggttataactacgaacgtgtattaaatttcttagaacgttatttagttattatgattgtattagctgtagctacttattttgtgtttattgcgttagcaaatggagactattggaacgttaccagcttttcatattcattaacaccatataatagtattatgtttattgttatcttgggtatttgcacgcattttaaaacaatgttatttaatacgattcaaatgattagtgctttctcattctttatttatttattacatccaatcattctagactcattgtttgcatatacaaatatatttgaggataatacaatggtctttctagcgatatcactactattcattttagggttatgtataggtgtcggtatgatattgcgtgaattctatatctttaggtttattattggaaaacaaccatataaattgaacattaatgcttattaattattaagctatgttaaaaacacgcggtgggcgaaatcagtttgaattgactgacttcgttttaccgcgtgtttaataatgttatacatatattctaattgcacatttaaacttcgtaaatgccaatgggagtgggacagaaatgatattttcgcaaaatttatttcgtcgtcccaccccaacttgcattgtttgtagaatttcttttcgaaattctttttgttggggccccgccaagatattacttgaataattcttttagaattctaaataatgatccgattaattgaaagaagtctgctgtcattgtatatacctccctttactttataaattatgcttgcttagtatcagtcaccttttcagttttcactaaatcgtctgctaaatgatgccaaaaatcttgtaattcttctcttgtgcgcactgtatcagaactgtcttgtcctacaaagtcaacatgatcccaatcatgttttgtaggcgtcacttgccaaatgcctttttgaattttatccgtcgcatttgtataagcttgattaaatggatgttgagaagaaataacggatactaaaccatcgttttctcgccattctttttcagttgctttaccgattaagttaccagtaatcacaaatgggaaaaacatatttaagtctgctttttgtctatcgctatttaatgctttgtgcgttgcttcaccagtgtatgttttatacacaatgttagggttcaacgacgttttacgatttaaatctgttgcaccctcacgcgtcagatcgtaaaatccattatcttttgatttccataaattagattgtttaacgcgtttgacataatcaatatatgattcatttggcttctgttttagaccccattgagccaacccgaagtctactcttgaatttttattaccaaacattttaccgatatcaaatacgatttgtctcactaaagcttcattaccagctaaatctgatgcgtgtgtaccattatgtggtgttcctaaagtagtaattgatgaaatcatgttgtcattattacctttgaatagtggagaaatttcgccaccatgtttcttttgatactctatttcttcacgattaccattacgcagtaattcttctagttgacgtatcgtttgaccgcccatactatgtccaactaggtgtaccttctgtcctggtttccagtctttgtaaattccttcgtatgtttttccataacgttcatgtccatattttgctgcatgtgctgcaccataatctacacgaccgcctttgatataataataaagttcaactgcgcggtcatagttacttccaaaagcacttatacttgcttcataagctttgtaaccattttcttctaaatcttggcgaatgttcattttattaccgccccaataatgagctaacactgaaggattaatatcatctgtaaacccattgaaaccatgcactaaaacgataggatcttgatttttatactgcccttgtttggcaactttattcgtttgatcatctttcgcttttgcagtaagttcctttgtccccttattcggtaacgtggctactgcactactttttaataaatttaatccatttttcttgtcattgtcttttgttggttctactggtgatttttgattgttttttaaatctgaaactgatagtgttttttcgtctttttgaggtttcacttcttgttcattgttaaaattgtggttagtaattttatcattcgcttgattattttgttgtggttgtactttctctatttctgtctcattaacaatttctcgttgacttgtttgatctgacttatttaatgatggtgcttcttttgttaaactttgtgaaggtagattgttattagcgtttgaatcttgactattatctacctcttttgactgttgctgtgacgccactttactttgtttgccatcattaatagcctgttctaacccttgatttacatcgctaggattagcattgttattttttgttgtatcacgttgaatatttttattattaagcgatgaatttttatcatcctttagttgatctttattcaaatcatctgttttacgatgattttcttctgatattgttttatcattatgcaagttcttagttaaattttcagtatgttgctgttcgtcaacaccgttttcacgttgataattagcattttccctagtttgttgatccccaatagattgtgctgtaactgtatcctcctgtgaatttcccatattcacttgcttctcagctgcttgtgcttgtccaccacttaaaaatagtaatgtagctattaaaatggaagatgcacctacactaaatttacgaatactatacttattttgacttttcatcattgtcagcacctctatttttttagtttagataaacaaattgataattattcgaggaataaactcaaataatttacttaaccaagcactcataatgaccatcctttctattgtttaatttgacgagaaagcgtttacatttgtatttaaaaaatatattctccaaagagaatttaaagtgtatacgctaatcatttcaaattattaattaatattatatttggcaaaatttaattagtcaataattagacacaatttaattatgcaaattgtaacttttttacatatatcttttgtgatttttaatatttacatgcttgggtcttgattccaatgatgtattatttttttagattagctgtatggagagatttatgagctattacagttattatgtttgctggtgtcgtattttaaacctaaaaatatcatcccatccacaatgattgtatcaggataaaccgtaatacttgttcctacattaaatatatacagttaattttcttccctcaaagtaagtatcctactatttttaatttattgtttaattactcttgaactacctttaacttaatctcgaatttatgatgattagcataaaaatacaccccataaagttagttttttagtctaactttcgggatgcacatcttagttctaatggagattgtcttttaaataggctatgacatttctatttcaggctagatatatttgtatttatagtataaatacaaagaatgtaaagacaactatgatattaataggtagtaacgacaaacataactctttagctttttcgccattttttcccatcataacttcattatatcgattcatatacttttcgacatctttaacagtgacatctattcctgagttgctcaatttacttttcataattatttttgatttcgtattgtgattatccactacttatctataacgagttcgcaactttagtaccatcacagcattcatagttaaaatatgttggtgtcgtattttaaacttgaaaatgtcacgttttccacaatatttgtaagtgtataagccatgatccttttccttatatcttagtccatacttgctttaccactgttcgatattttgtcgttcacctttaaagttattgcgcttatgatgtctacgcgctaattccgcctcaatttctgaaaaatcgacgcctagcgcatgcatcaagacaaataaatgataaagttcatctgctacttcacttacaaatgcttttttgtcacctttaattgcttcaattacgacttcaaaagcttcttcaccgtatttttttgtaatcttttctataccttctgttaataaatattttgtatatgacttttcattattggattgggcactatcttgaactgtctgcgctaatgtttgcactgaaaatggaacttctgtgttgaaacaactttgactgcctgtatgacatgttggtccatttggtatgacatcaattaaaatagtatcattgtcgcaatctacatgaatatctttaacaagttgcgtatgaccagatgtttcaccttttgtccatagacgttgtttcgaccgcgaatagaaacataccacaccatcttctatcgttttatcaaaagcttcttgattcatataacccaacatcaatacttgttttgtttgattatcttgtaaaattgctggcactaaacctttgctaaaatcaattttatatttggtcatcttactgctatacccccttgccgtatcacttctttaattgattgaaccgtcgtttctcggtcatgtaatatacttgcagctaaacctgcagaaacatccgtctgattaaatagttctacaaagtgttgtgcattgccaccaccaccagaagcaatgattggaatatttacaagggattttatttttgcaagatgctcaatatcaaatccttgtttcataccatcatgtcccatacttgtaacgaggagctcacctgcacctaactgttctacttgctgtacccagtcatatactttaatatttgtcatttttttaccaccatgcgtacaacaataatgtgcttttctttcaggatcataatagctatcaattgctatacagatgcattgtctaccgaatttatcactcgcttgtttaatgagctgtggattttttaaagcacttgaatttaatgatactttatctgcaccatgatttaacaattgggtaatatcatcgagactttgaatcccaccccctacagtaagagggataaacaagcgtgacgctgtctgttcaatcacttctagcattaagctatgaccctcttccgtcttagagatgtctaaaaatactaattcatcagcacccgcttcattgtaatatattgctaaatcaacaggattccctatatcccttaatcctttaaattgaatccctttaacgacacgaccatctttgacatctaaacatggaatgatacgttttttaatcattctagcccctcccaaaaagatgcttgatgtgcagcctttcctataatagcagcgtgaacatttagcgacgctaatcgttgaatatcttgctgatgtctaataccaccggaagcaatgacaggaatcgtcgttgcctttactaattgaccagttaattcaaagttaggtccggacattttgccatctttagcaatatcagtatatataatgcctccaagaggtatatccgataactgtctcacaaaactaaataaatttaactctgtgtcctcttcccatccgttcactttaatatcttctccataagcatcaactgacagataaatacgacctggaaatgtatgtgccatctctttaagccaatcagtatcttgaatgcctttcgttccaactatgcaataattaatccctgcggcaaagtagtccatgatttgtgacttcgtacgaatgccaccacctacttcaatatctttggttgttaatctcctcaatgacttaatataatcaaactctcgggcatactgtgccttagcacctatcaagtcgacgatatgaatacgattcacacattcaaattgactatagtaagcaatactttcttcagccgaacgcgacattttttcttcactatcatatttaccctctgttaacctcacacttgttgacccaatcaaatcaatcgctggccataattcaatcatttataaatcccccttgtattgcctgacgcaaaatttgtaacccatatgtaccgcttttttcaggatggaattgaataccaatataattgttaaattgaacaattgccggaatatcagccccatactgcgcatatgcaatgacattttctgacatcggcgcttggtaagaatgtacgaagtaaacatcttgatttaacataggatgcttactcactaaattattccaacctaagtgcggcactgggtattctgtttggatacgcgaaatatttcctgggataaaccctaatccagatgcatcgccttcatcactatgctcatacattaattgcatgcctaaacaaataccaatcatcttcttatcagtattcttagccaatattgcattgagatttaatcgttttatctctgacatcgcatctttaaaatggccgacaccgggcaatatgattgtttctgcttgatcgattatttttgaggtatttgagacaaccacctcataccctaaatgttcaatagcgcgttttacattactaatattccctaatccataatcaacgatgacaatcattcaatcacacctttcgatgacggcacacgctgatcatcagttgcagttagcgctatgcctaatgcacgggaaaacgctttgaatatagcttcaatttcatggtgtgtattacctccacgaattaaatcaatatgcgttgttaatcttgcattgattacgaccgctctaaaaaattcttctactaactccgtatcaaacgtaccaactttttctttacttaatgatgcattgaatgataggtatgggcgcccacttatatccacaacgacacgtgctaatgtttcatccattggaatgtacatcgttccataacgaacgaaatgctttttatctttaatcatttcaagtaacaattggccaatgacaatgccgatatcttcagttacatggtgatcatctacgtcaatatcaccttgtgcctcaatgtttaatgacagaccgctatgaaatgtaaacaatgttaacatatgatttaaaaagcccacacctgtattaatatgcgatggtgactggtcatctgatattgaaatatttagttgtgtttcagctgtgtttcgttgtttttgataaatcatattttgcgctccattctttaacaatttcttctaattgctttaactgcgatgctgttgcaattgagtatcttacatagcccttcatcaccggctcatcataaaagcgaggtttaaatccttgttcatatacgtattgtcctaattggtgcgctgctgaacctttagtaagtacaaaattggcatttgatgggaatactgacattttatctgcaacatgtgtatcaaatatttgttttaactgctcagctaactgtcgttgcatcgttaaaaatactcttgtctcttctctatgtctaaaaatataagtcgcaatatttagcgtaaatacatttaatggatatggatgttctattttttgaatatgctttatcgttccagcagtactaattaagacacctaatcttaagccggcaattccaaacgcctttgataatgtacgcattcttaagatgtgtggtgccagttccacgtcatatgccgtaccataatctaaatatgcttcatcaatgacaaagtatccgtttaatgctttcatcttatctgcaatagctgttaaaaatgccgtatcaaattgcttgcctgaagggttatgtggattactcataataaaaaatgatggttgtacttcatcgattttcgttaaaatggtttccaaatcaaacgttaaatctgatcctgcatctacaaatgcaatttcacgatttacttgtgccgcatatgcttgatacataaaaaaatcaggatttagcgttaatgccggaccttctggcatgatcagcattaacttttgaatcaattcatcagatccatttcctgcaataatttgttcaggcgataatccgtaaaacttagcataagcttccttgaattgttcatatgctgcatcaggatataaattatatggcgttgcactaataatagacgtcattgttttttcatccaacggcgtaactggactttcatttttatcaatataaatcatttcaattacactcccctaagactgacgtattaaaatagactgctggtgattgtataatgcttcaacatgagcaatatgttgtgctgaatcagcaatttgttcaaacgtatcttttgataaatggatgaccgtgttccgtgttaagaaatcattgaccgataacccattggtaaatctagctgttctatttgtaggtaatacatgacttggacctgcaacgtaatctcctatgacctctggcgaataatgtccaataaacaatgcacccacatatttcactttttcaatatatggttgaggatttactgtttgaatcgacgcatgttcaggcgcgattgtattcatgacatggcatgcttcatcaaaattactagcatggataaggtagtgttgattagcgatacttttagaaacaatgtcgtatctgtccacattaggcaatgctttagcaatacgtgattctaaatctttaaggacttgcgcatcttcaccaatgacatatgtacgtgctaattcatcatgttctgcttgcgcaaatacatcatatacgatggcatctaaatctgcggtgtcgtcaataatcagtgctatttctgttggtcctgcaatttgatcaatacctacctgtccaaataaatattttttggcatatgcaacaaattggttacctggacctacaatcttatcaactttaggtatcgtttctgttccataagtcaatgcagcaatactttgagcaccaccaacttgaaacacttgattaacttgcgtaatataacatgcagctaatacctcttgggatactccgttaggttgaggtggtgtcacaacaacaatattttctacacccgctacttgtgctaaagtcgctgtcattagaaccgttgatggataacttgctttgccaccaggcacataaatacccacactttctagtggatggtatatttcataacactccactgattcttctaactgttgattcgtctgcttaatactttcttgatatgctttaattctttcataactttgttgtaatgcttgttttgttttttcatctaatgtgtcaaatgctgctttaatttgttcatgactaatttctaaatgatctgttttcgtatgatcgaatgttagattatacattttcaaagccttatctccatgaactttaacttcctgacaaatatcgcgaataattggatacaatgactcatctaatggtgcttctaatgaaaattgatttaaaaattgttgtgcattaagcattggcaatagacacctccaaagagcgaataaattgctctattaattgtgattttttaaaataagctgctttattagttattaatcttgcattgatatcactaatatgttgcttttcaaccagtccgttcgcttttagcgtagtacctgtttgaacgatgtcgacaattccgtctaccatatctacgacacaagctaattcaacagaaccattcaatttaatcaattcgacatcaataccttttgatttaaaatatgtttcagcagtatgaacataactcgttgcgattttacgataattggtcgtttcaggtttcgctgcaaccgcaaaatgacatgctccaaaaggcatattcaacaaattattaacattatattggcgctcatctaatatgtcgctaccaacaatgcctatgtcggccattccttgttccacatagattggcacgtcacttccttttactaaaatgcattcaatattatctacacttaataataattggcgttctctattttttaatgtttctgataatgtcgtatattcaattacatctaaatagttaattaaactatccattagacgtcctttggctatggcgattcttaacattgtgcatactcccttacttaaagtgttaatcctaatccaaacccttcgatgcttcctttgtaataaccacctgttaaaactcgagattcattttcagcaaaatgacattgaataaataagcctgtgtaataggatctaggtggctgcgcagtaatatctaaatggatgtctttgtaaccttgtgtatgtaaccaacgttcccatatttttaattcaacgagtgctggatggtcatttggaatatagtgttccaatacatttaattgttgttgcgtattctctttcaagatttgcacgattggatgttcagtcgacaaatatgtaaccagtcccgataaattacgttcctcaatcattgatagtatgtctggtgtttgtaacgatttatcgagtaaggcatcaagcaattgataatgtcccaatacaacaaaatgcacgttgtctctcaactgctgttgaataaactgaataaatagctttaagctctgttgtacattcgctaatgatggtgcatagttttccaaacccacttgtacagccgcttcattattccgaatgattaaacctgtgtatgccacttttgttgctgcagttggatacattgagtaataacgcaataattgatctgtaaaatcatttcgaagtgcataaatttgatgctcatgttgccaaaaatttcgctcacccatctgctgcaaatcctcatggttcaattgtttccagtccaacttttcaaccacactaaaatcaactaactcataatccgctttattaaaatattttaaaaatgctgtttccgattcttttaacgcaattaattgttctgaattattcactcgaccaccctttactttcaatactgtatttaaaatcacttggtattttcgttgtttactttacttctctaccacactaaagtgtaatatgattaataacttatcatttttagcaatacattacaacctttttcagaaaattcggtgtattgtttttaaatttttacaaaagaaaaaggcaagacatttgtgcctataaaaatgctaaaccaagatttttatattgaagttgtacttcttgcacatattgtgcttgccttattatgtaaagttattttctttctatctttttattaaatttaactattcttcataatcccgattacctttaaagaattgtctatcttgtttactatatacattttcaggattaaaaaacggtttgagtttatatttaaattcaaataagtttagaccatcaatcgcaaccctatcttggtaaacgttcgttgctgatatatctgtaaaattgtttggaccgacacctgcaataaacttaaactctgcttcatctaccaaataatcatacgcttgtgtatgtctatcctgtgcgccatgtggaaatacaaacatatctgttttacctacaattggttcaacttcatctttccatcttttagtatcacgtttaataccttctaaagatgttttttcaaaattaatgtgaccatatgaatgactcgcaaatgaccatccatcccgtttcattgcgcgaacaacttcctcagctgcctttttattctttgtataatctttactcgttaattcattcgtgcgataacctaatacgccctcataaccggttaaagcaacaacacctttttcaccatttaaagaaaaatctggatgctcttttacaaatttatttaaaattggcacgatatcattgtcatcagaataagtagcatgaccttttttgtctgtagtttcagaaacaacatgtttatttttatcgagtactaaacggtcagcataaccatggtgtctcatgtaactatagtaattcatatcatcaattgagatgattagtggctttttacctttcggcaattttatttttttggcttttacatgatgagatgataagtcgtatacatcatgtggattaacgatgatgtaattatttttatataattcgttcaatgattttttaaattcacttacagtaatcatccaatcattgttgcccttagcttggtgtgtatctcctgtaaacgcaacttttgggtctgtaattaatgggtgataaaacacatgataaacttggccgtgatatgtttcccaatgttcatccattttcgatttatgctttgcatactcatttggattaacagatttattttgagctttctcattttgcttggaacagctatatagcaatgcaactgataataacagaaaaaatagcaataaatattttttatgcattaaacattctccctatgttttattatgcacaattataacatttttattatgtggctcataactttttaagaaactgttgggattttaattttattttttagataatgtcatagtattttatttataaaacacaatatttccttgattgataatgtcgtccatagctttgtctcgcttgaatttaagcctttctgctaaatttattgaacgttggttacacttatttgtcctgataacttttactgtttcttgatcgatataattcacaaaatttgtgattgctgtaatagcctcacatgcgtacccttgtccttcaaaacttggatgtaatttataaaataaatttagtactgtttcttgctttaattgtcgatattcatatccacaaataccaataacactacaatctatttttttcaccaatacaaagtaaccaaattgatattgttgccaatggttttgccatttttcaatccaccgttgtgtgtctaatttggaattatgtaaacctttgggagtgtatatatttgcttgtggatgactacaaatattataaagttcaattaaatgcgaggaacttggaatcattaaatttaatctttcagtatttatcattaaatgtctccctcctatttctatttaaagactatttatatgaatactaatgccacgggttgaaatatcgactattatttaaaaagaataatgtaactactaacatcagaagtattaacgtcaaacacaaaacaacataatcatctttttttaattgttttttgacgtaccaggttctccttttatactgtccgaattgtcttaactccatagcagtactaatagtgtcaattctttcgatactagaaaatattaaaggtaacacaatgcgtttgatacctttaacacggctagtaaatttcgcttttttcgaattatcatatcctcttgcttgttgcgcttgtgaaatattaaaatatgtttcttgaatatctggaatataccttaatgctagtgagactgcgtaactgattttataattcacacctagctgatttaaacttgcagcaaaatgactcggattcgttgtgaataaaaatattaacgctaaaggaactgtactaatatattttaatattagattaaaaagatagaataattcctgtgatgttagcgtaaatcgaccaataccattgactaactctgtacgctgattataaatcttcacaccatattcagggtcaaatatgtatacggcaataatatttaatattgtgaaaaacagaatgaatttaacaacaaagcgaacttgtttccattcaatatgagcatatttgaacaataaaatagatgaagcactaattaaaattaaatatcttgtgtcataagtcaccattgcagaaatagaaacaactaataagaataaaagtttaacagtcgcatttaattgatgaatacgactatttcccgggtgaaaacctatagtattatattgattcattggcgtctcaccttcctatcatggttaataaataattgtactaatttctgtggctcgctaatccctatatattcggccatttcaaatagcgatgtttgtctcaatgatgcaatctcacagatttttttatcatttaatatcaatactggcgtggtatcagcaacgacttgtccttttgataatacaactgttcttgaactatactcagacaataaatgcatatcatgcgtaatcataataatcgtctttccctgtctgtttagctcaattaaaaatgacattatctcattataatgatagaaatcttgaccagcagtcggttcatccaatatgattatttccggatttaagactaaaacagatgctatagtgaccctctttttttgaccatagcttaaagctgcaattggccaattccgaaatgcataaagtccgcatattttgagcacattctctactcgtatctttatatctgattctttcatacctcgtgctcttaaccctaatgctacttcatcgtaaatcattttttcagaaatcatatgatttggattttgcatcacataacctacgaattcagatcgttcgctaattgacaattgattaaatcccctattacaaaattggatattacctgttatatctaaaaatccacaaattgctttagcaagtgttgatttgccggcaccattgtgaccaactatactaagcatttctcttctataaacatttaattgaacattattaagtacactattactatagtcactatattgaacacatacctcatttaattctaatagcggttcagatttgtacttattatcattatttgcagatgtttcatctatccattttttcactttaaatttaacatgttcactcatacaaacgtcacgtaaattcgctaagttatcaatggattcgacatctacttctgcatatttaagcgctgtacagtataatggttcacgtatgcctgcttctttaagcttagatgattttagcaaatcactaggcgttgtattagcgatgatttttccatctttaaaaagaagaactctatcaaacgtatcatctaatgattcttctaatcgatgttcgacaataatcatcgttgactttgtttcttcatgaatattgtttaacaatctcagcgtttcatgtcctgtcgcaggatctaaattggccagcggctcatccaatattaaaataggcgtacgatggattaatataccacctaatgaaacgcgttgtttttgacctccagataaatcttgcggtcggtgatttaaatgttctatcatgccaactttttcagcccaataacttacatttttcttcatatcatcttgttcaacacaattattttctaataaaaaggccatatcttcagctgctgttaagcctatgaactgtccatctgtatcttgtaaaactgtaccaacaacattagatctatcatgtaaacaactaacggttgcatcttgattatttatatatagttccccggttatgttacctttagttttaaatggaattaatccgtttatgcaatttgcaaaagtcgatttaccactacctgaagcaccaactactagcactttttctcctggataaatatcaacatttatattctgtaatgtaggtgttgcttgactatgatattgaaaactaaagtctttgaacgagataattggttcagtcatgatatatcattacctttctacattcatttacatatctgattcaacaaaatgattattctttacgtaaactacctttttttatttgagatgaagcatatgcttttaataatattgtcccaataataccaactgaaataatatttaatactgcagagataacaccttgtgtataaaccttgttagccggttcgttataaatcaaaatatctaatgttggtgcaataagtgcccagcaaataatattcgcaataatttgaccgatattaaaataaatcatcgatttcctagaaaataggcctgaagaaagatttaattttaggccaatccatccatataaacagcctataattcctgaacaaataacccaactccaccaagcactaccgtatgtcgtgaaatctttaatagcgtgtccaactaatccagtcattaaaccagcaaaaggcccaaatattgcagatattaatgctaaaaatgcataagatgtttctatattcgtattaggaaaacctgttggtattacaacaaaacgccctaaaatcacaaataccgctgctcctataccaatcgcaacaacagttttaactgaaatatcttgttttttcatcttcattactccttacataaaaaattcattaaattgatggtgctttagataaatgaatcgtccaatcatttccagtaccaatatgatataaatctgaaaatgagtcttgattgactgctacaccaatatttactagcgagttaacatacacaagaggttcacccacattaacatctgcaaacgatcgcgcaaatttaataatattttgatagactttcttatcttgatgataaattgttaccaccaaattattaccatgaacaatttccaaggattttaagaatgccaatggaatatttgtccataatgacccaaatctgatatctaaaatatcaatgcttcctgtaacagaatcctcattttttgtcgcttctcttatttctaatgcctcaatactatcaacattaattgcctgaccgagacgttcaaacgctatcttatttgcagctaatctcgcaccattgtatgcataaacatctctaccatgaaaagtatgactttcttccgaatgaggcaatcggcttttcacttcatcaatttcgataacttttttaataccttcgtaatgtttaatatgacttaaagaaccattatcaggtgtaataatgtaatgacctgaatatgttaagcaagcaatgctccgcctatcactacctacacccgggtctaccactgatacaaaaactgtgcctttaggccagtattttacagtttgatataaacgatatgacgctacccaaatgtcatacggtggtatatcatgcgttaagttttcgacacgtatatcatcacttacagtatatgcaactccatacattgcacttacagcgccatcactaagtccaaaatctgattgcaaaaccaaataatttcccataaaatgcctccttttttaaaacttcaaaaaaatataatctacatatttaacgttctatattttgaattttcagaattatattaaaatagtacgagtcacttgatgcaaagtcaatagtagtgactataaaaatgataataatagtcagatttatctcattaactaaatttcacggacttgtaatcacttctttatgtttgaattaattgactagggtataacaatagtgtggtgttttataggtcattctttaaatacatcacagaaaatattcgaattcgaaataaaatgcttgcatctttgttttttaggtggtattgtatgtatatcaagtataaaaaatatatctaagagataaaaatatggaggttttatattatgactaactttacttttgatggtgcacacagtagtttagaattccaaattaaacatttaatggtttctaaagtgaaaggttcatttgatcaatttgatgtagctgttgaaggagatattaatgacttcagtactttgaaagctactgcaacaattattccaagctcaattaacactaaaaacgaagcacgtgataaccacttaaaatctggtgatttctttggtactgatgaatttgataaaatcacgtttgaaacaaaatcagttactgaaaacaaagttgttggtgatttaacaattaaaggtatcactaacgaagaaacattcgacgttgaattcaacggagtaagtaagaatcctatggatggttctcaagtaacaggtgttattgttactggtacaatcaatagagaaaactacggcattaactttaaccaagcacttgaaactggtggcgtaatgctaggcaaagatgttaaattcgaagcatcagctgaattctcaatctcagaataatctcattacacaatcctcattgttttaatatatatatacgaaatgccaactatatcatccctaggtatagttggcatttttcgtttaactcatgtgtaacaagcactaactgttcaccctaatttaagacgcctttcattcaggtaggtcttattgaaactgaaaactttgatgaccttttgcaaagccattaactgtataaagcatagatcctccgcccatttctatatcattggaacaaatgatgagttgatttgttccaggtataaattgcggatgagtagaacgtaacatatgcccttcatctcggcctggtatcaatatttgtcctattggataaccccttttattaaaaactaacactcgaccttgaccatacattgctacgtataaattatcgtcactatcaatacaacatgagtctggtccttcatgacctgtaaaatagtacggtatagtagctccaaatggttgtatcgtcacaccatcatcttcaagtgcaatgcgatgtaatcgattggctgtagtttctgttacccatagtactttttcatctgtacttaaagcaataccatttgctacgctaatattttgaatgataggcgtcactgttctaaagtccggcgaaacataataaacgcctcctagtggattggtagagtatcctctaaaatctgtaaaataaaatccacctttagaatcaaataccatgtcatcaatacaatatgctgttgaaagatcttcaataatatcttgtaagttgtcaccattttctgtagctgcaaaaatgcctcctgtagatttaaaatctcctaaataacaaacgaataatcggccatctttatgtattttgattgctgcaggattcgctttgtgacttacaaaaggtcgtttgatttccttcgtttcaggattgattttgaaaatattgccttcgaatacatccaataaaaagagttgtccctgccgatcaaagttcaatccttctagttgcaatccttttttggaaatttcaagccatggttcagctgtaattgtttgtaattcactttcagatataattggaacagcactattggacttcccgctataaaataatgtaggtaaatcttgttgtgacatcatgatcattcctttcatttcattcgttttaactatcaattttattttaaacaagataactatcaaataaaatgataacggtttcatctatctattttatcggtctagtggctgatttcaagctagaaatattgaatgacaatacaactctgttaaaatgatggacgtagataaatatgcgtattgacgctttattttaaaaattaacatgcttataacatgtttatagaaggagattaacctatgaactatcaagttcttttatattataaatatacgacgattgatgaccctgaacagtttgctcaggatcacttagcgttttgcaaagcacaccatttaaaaggtagaattcttgtttctacagaaggtattaacggcacattatctggtacaaaagaagaaaccgaacaatatatggcacatatgcatgccgatgaacgattcaaagatatggtgtttaaaattgatgaagctgaaggacatgcttttaagaaaatgcatgtacgtcctcgaaaagaaatcgttgctttagatttagaagatgacgtcgatccaagacacacaactggccaatatttatcacctgtagaatttagaaaagctcttgaagatgatgacacagtcattattgatgcacgtaatgattatgaatttgatttaggtcatttccgaggtgcaattcgcccagacatcacacgctttagagatttacctgactggattaaagagaataaagcgttatttacagataaaaaagtggttacgtactgtacaggtggcattcgatgtgaaaaattttctggatggcttttaaaagaaggtttcgaagatgtagcgcagcttcacggcggtatagctacatatggtaaagaccctgaaacaaaaggtcaatattgggacggtaaaatgtatgtatttgatgatcgtatcagtgttgatatcaaccaagttgaaaaaacaattattggtaaggattggtttgatggcaaaccatgtgaacgttatattaattgcgctaacccagaatgtaataaacaaatattagtttctgaagaaaacgaaactaaatatttaggtgcatgctcttatgaatgtgctaaacatgagcgtaatcgttatgttcaagcaaataatattagtgataatgagtggcaacaacgtttaacaaactttgatgatttacatcaacatgcttagttttaattaaatacctttcaaaacacgctttgaaaatccgatttataaaggtttttcaaggctgttttttatgcgcatacataacctgatatgtttttaattatgcgcgtgttatactaaattaaattttaatactgcggggtgtcttaaaatgcacattttagtaacagggtttgcgccttttgacaatcaaaatatcaatccctcatgggaagctgtgactcaactagaagatattattggcacacatacaatcgataaattaaaactaccaacctcttttaagaaagtagataatattataaataaaacgttggcatctaatcattatgatgttgtactagctataggacaagctggtggtagaaatgccattaccccagaacgtgtcgccattaatattgatgatgcacgtattccagataatgatgattttcaacctattgatcaagccattcacttagacggtgcgccagcttatttttcaaatttaccagttaaagcaatgactcaaagtattattaatcaaggacttcctggagcactttcaaatagcgcaggtacgtatgtatgtaatcacgtgctttatcacttaggttatttacaagataagcattaccctcacctacgattcggatttattcatgtgccatacataccagagcaggtcattggtaaacccgatacaccatctatgccattagaaaagatagttgcaggtttgactgcagccattgaagctatttctaatgatgaggatttacgtatagctctaggcacaacggaatagttataaatgcacaaacaaaagcaccctaatttgttagtttaagtctaactttagggtgcttttggatgattggtatacagttttactataatgatgtattttagctaaacgacattgtttagtcttctttttttaacttcctaaaatttacaaatgtataaataataaatgctatatttagaatgatgagtatacttactgaaactaaattaaaagtgtctggttctttactaaagatagctgctatccttgctatcaaacttggcaatgaaattaccaacacgatgagcgcataaattttctgtttaattaaaatacaaattacaataagcgcaattaaaagtactaacccaacgatgaaactctgtttgtcacttaactcaaagaaactatagataggatattttttaataatcaaaccaccaaaaatcatccataaaaatacgacaattccataagtcacatttataacatacgttattttttggtcaccaaatcggactaatgtattgcgtagaatcagcataccaatgacaacacctaaaataacgatactagctatataaagtaaaaatgcaattgtcacatcaaatgtacccaaatctaaaaacctaggaattataatgactgctaatataaaagagaagtacaaagtaatatatttatacaaaccggtagtaagacttatctcaggtgataattgatcagccattgacttaatcggtgtattaataattgaacttgtatcttcgttatttttttcagccatagttaaatgatcttcgagctcttccaataactcttctacttctgcttcagtcttacctctaaataacaattcaacacgtaatttttctaaaaaatcttgagattgtttagttaacatcgttttcccctccaaacaagttaatcatccctttattcaaagcttgccattttgatttaaatacttttagttcctttaaacctgaatcggtaatcgtatagtatttccgcctcgggccgccattactagatttttttattgtcgtatcaacgtatccttttttgtttaaacgcattaaaactggataaatactaccctcacttatctctggaaactcttgattcttaagtttcgtcataatttcatatccatacgtttcgccttgggcaatgagacctaatatcgccccatctaagagacctttcataatctgatctgacactgacattttaatcacctactatcttacataataagatagtacattgagaacttttcgtcaactatcttttattgtaaggtagttgttgtacacattccttaaatgactaacaactttgttaatagggtaatacttacggaagtatgttttatttatgggggaggaattaataatgactacaaaaacagtatttgatgtcattgatatggggttaggatatttagtaaatgtgtatgatgcttggaaagttgaaaaggtacttgatgattatcatgagcctttttctaataccattcattggcaatttgggcatgtattaacaatttttgaatcggccttagctgttgctggtaaagagaatattgatttaaatatctatagacctttattcggaaatggttcgtctccagatgaatggaaggatgaagtaccgagtattgaaaagattttagaaggtctccaaacattacctgaacgtgcacgaaatctaactgaagatgatttagcaattgaattgaaacaaccaattgttggttgtaataacttagaagagttattagtattaaataccattcacatcccacttcatgctggtaaaattgaagagatgtctcgtatattaaaaaatttaaaataaatatgtgcttattaaccgttaacaacacgttaacgggttttttatttgtttaaaaggccacttttttgaatttaataaacaccatctataccagttcttcaccgcttctcgaaaaataattatattaatgatttcgttaatttaattttatatttaattattactgtacatcttttgtagttagctttattcttaaattgaaatatgtataaaacatagaaagaaggacgttttaacatggaaaacacggttaaatatcgtaagtttatactccctatcgttgtaggtctccttatttgggcacttacaccttttaaaccggatgctgtggatccaacagcatggtatatgttcgcaatattcgtcgcgacaatcattgcttgtattacacaaccgatgccaattggggccgtctctataattggatttacaatcatggtactcgttggcattgttgacatgaaaacggctgtcgctggttttggtaataatagcatttggttaattgctatggcatttttcatttcgagaggatttgtgaaaacaggtcttggtagacggatcgcacttcatttcgtcaaattatttggtaaaaaaacattaggcttagcatattctatcgtcggtgtagatttaattctagcgcctgctacaccgagtaataccgcgcgtgctggtggaatcatgttcccaattatcaaatcactttctgaatcatttggttcgaaaccgaaagacggatcagcacgcaaaatgggtgcatttcttgttttcacagaattccaaggtaatttaattactgcggctatgtttttaactgcaatggccggtaacccccttgcacaaaatttagcatctagcacatctaatgttcacattacatggatgaattggttcctagctgctttagttcctggacttgtttccttaattgttgtaccttttattatttataaaatttatccaccaactgttaaagaaacaccaaatgctaagagttgggctgaaaatgaattagcgactatgggtaaaatcgctttagctgaaaaatttatgattggtatttttgtcattgctctaacattatggattgtcggaagtttcattcatattgatgcaactttaacggcctttattgcgctagcattgttattattgacaggtgtcttaacatggcaagacattttaaacgaaacaggtgcttggaacacattagtatggttctcagtattagtgttaatggccgaccaattaaacaagcttggatttattccttggttaagtaaatccattgctacaagtcttggtggcttaagctggcctatagtactggtcattttaatattgttctacttctattcacattacttatttgcaagttctacagcacatatcagtgcgatgtatgcagcattactaggcgttgccatcgcagccggtgcaccaccattattcagtgcattaatgttaggtttcttcggtaacctattagcttcaacaacacactatagtagtggtccagcgccgattctattctcttcaggttacgtgactcaaaaacgttggtggacaatgaacttgatcttaggtttcgtctactttattatctggattggtttaggatcactttggatgaaagtaattggtatattttaaaatatttaaattagtgctcgaatctcattgatttgggcgctttttaatttgtatttaaaatcaacctttgctaaatcaagactccctttttaaaatacgtttatcctttaaatcattgcgtgcttcactgaaaatttgtataaagatttaagtcattacgtaacatcacataaaatacatttctatactattccgtttcattgatcaacattacgtatgccctcataaatcatgaaataaaaaaacaccttcgtttaaattcattttaagtgcgaattcaacgaaagtgatttatttcatattcaatgttttaaatttatacagctgtcactgttactgcacacatacctcagtctcaccttatcatgacacaaaggatattgaaaacacgtataattatctttcctcgtattttatagggtttttgcgaccggatgtttcttcaatttaatgtattgagaaagactatataacacaatacctgtccaaataaatataaacgtaattaattgatctatactaaaaggctctttgaaaacaaatatgccgagtacaaacattattgttggtccaacgtattgaataaatcctattagcgaaagtggaatacgttttgccccggctgagaataggattagtggtattgccgtaatagcaccagaaaataacaaccaaaatgatgacatgttcaatccaaatgacatctgatgttgctgccataaataaataacgtatattagtccagcaggtgctgtaacaatacattcaatcgtaatactgctgatggcatcaatatgtactacttttttcaataatccatatgtaccaaaggataacgctaatataatagaaacgattgggaattctccaatcttgagcgtcatatataatacaccgatgaatgcgaataaaatggctagccattcaaatttattgaatctttcttttaaaaagataagtgcgagcaaaatgctaacaagtggatttatataataacctaaacttgtttgtaggacgtgaccgttcgttacagcccaaataaatgtaccccaatttaatgtaatgacatagcctgctacgacaatcgctaatagctgaatgggcttgcctaacaattgattcatatctcgttgaaatgcattgcgttgtttttgtccaaccgcgagtatgaatatcatgaatattgctgaaaatataatacgaaaggctaaaatttcaaatgcgcctattgcatcaacgaactgccaatatataggtagtattccccacagaatgtatgcactgagtgctaaaaatataccttttttatattctatattcacttacatacctccttactctcccaaatttttaacatgttacgctcacttggttatgctaatataacgattttactaataatatttcgataaagatatcattttgtttatatttcccacatttattcaccaaccactaaacaatattaattttataaataattctgtacaaatcagggtatattgccagaaagactaccatacaacataaaggatggatacaaatgactttacctaaaattggaaagcctgcaacacgcgcgctaaattcacaaggtatatacacattagaagcagtatcacaatatacgaagtcatctctaatggagatgcatggcgttggtcctaaagctatatcaatattggaacaagctttatttcagcaccaactacattttaaaacggaagttcagtcatcattaccttttaagttaacaggagatgtgtcatgcaatcatgcgcctaaacgtcaacaaatgatagattttatagttgctacagcagcattagatattgaattattacgttcactggttacaacagaatttatttggtctgtgcctggacactttgacatttatggacctcaaattttaattcaagaactatctaactattacaatcaggttgctagtctcaatatccactccaacatcacacatgggtgcttaggttccatgcatggtattgaaatattaaaaactggtaaagagattcattttgctcatttttttgaatttgaaaatcataaaaaggatgccaagttaagcaaagtgacatcttacattgttgttgcttaatgactcataatctataacgctaaaaactatcgtaattacatatatatgttaataaaacaaataattttgcataatatttttgttatatgaatgctttttactagagtgcacattgaacatacagtatgattaaatatcatgttatgaaagaaggatatattttgactgtttttaaaaatgagcgcttaagctggttaccatacatagctattgtcattttgttacacgttattgggtttagttttttatggattgctggaaaagaccatcatatcttatttggtatggggattcttgcatacacattaggtttgcgtcatgcatttgatgcagatcatatcgccgcgatagacaataccgttcgtaaattattacaacaacgcaaagatccatctggtgtgggtttctatttttcaattggacattcatctgttgtatttttaatggctgtttttttagggatatctgtaaaatgggctaaagatgaattaccacatttccaagatattggtggaacgattggtacactagtttcaggtttctttttagtgcttatcggtgtgttgaatctaattattttaatctctttaattaacttgttcgctaaattacgtcgtgaacacattgaagaagctgaagtcgatgtattacttgaatctagaggatttgtttctcgatttgtaggaccttatttcaagttaatcacgcgtagttggcacgtattgccacttggctttttatttggacttggttttgatacagctagtgaaattgcgttactcgctctttcttcaggcgcatcacaacaagccatttcatttatcggaatcttatctttaccaattttattcgcatcaggtatgagtttattggatacattagatggtgttgtaatgaagtatgcctataattgggcattcttcaatcctattcgcaaaatctattacaatataacgattactgcgatatcagtcatggcagcattagtgattgggatgattgaattgctacaaattcttgctgataagctagatttacatggtgcgttttgggcattcattggttcgatcgaatttgattatttaggctatattttagttgcattatttttaattacttggcttatttcaagtttaatttggaagtttggtcgcatagaacacaaatggtctaaataaagtaacttgtcttgcaactacctttgtattgttgcatttttagacaccctgcacacttcttccattatgctacgctctcagtagtcatctttaaatcgtttcttttagagatgacttcattttgagagcgtatttttctatttaaaatgtatttatccaaaattcaatgctttcgaatttaaaatttcagcatttctgtttaaaatttaattataatctttaatacaggaggcgctatgcttatgaatattgcgaagttagagaattatttacaaattgattcatctcgttataatcgaccgagtattgaagcattaaattattatgcaacacgttttatgttaactgtaccttttgaaaatattgatgttcaaaatagtaagccgatatctataaatatcgatgcactttttaataaaattgttcatgataaacgtggtggtttttgttatgagttaaatacatttttcaaagcatatttacaacaaaaaggatttaatcctgaattaatgtcagctactattcacacacccggtggcggtcgtagtctgaacggttcacatgcttcacttgttgtttctataaatgatgtattctatgtaactgatgttggctttggagacttacctctacatgccattcctattacttcatctgagcatacacaaccaattactgatatcagtggtacattccgcgctatttttaacaacgaagacaaggatattttctatgttcaaaaattcgaaaatgatcattggcatacaaaatatgaagctgaattcaaacctaaacaaatagaagattttaatagcaacatcgaatataatcaaacgcatccagattcaatatttgtacagcatttattaattacaatgccacaatcatttggccgtgctacaatgtctgaaaatcatttaactttaacaaggaatggtagctcagaaaaatttgatgtcactaaagataactataaacattttttagaaaaatattttggactaaatgtaactattaatcgtattgaaaaacaataatagtaaaatataaaaatatgggcgtatcttacttattgtaggtagcgccccttttttatgcttcataaacacaacaaaaaggatatgacacaaacttcatgtcacacccttcttttgaaccgcttcattttacttaagcaagtgcatctacaacataaatgacacctacgaatacaaatgcaatagcaatcatcgtcgaaataaagacgatacccattaatggattaaataataaaatgacaccgaaaacaatacctaataaattaaaaatcactgaaattagttttaagctaccactacccgtaaacgtaaataatcctgcaatagaactaaaaatgaaccagaatgcaaacatgtagataaaaaatgccgagctagcgccaacattaaaaatgacaataagaccaaagagaatatctacaatccccataaacagaatccaattttggttaccacctactaaagcttttgcttttctacggtaaatgatttgaatcacaccgttaattaatacaaacagtccaatcaaccaggtaatagcataaaaattttcaattggaaatgtaaaaataacgactgccaacattaataataatacacccattattaaactagaccatttaataccttgatttcctttttccataacaatcaattcctttcaaataaagccctcttttaatttttacaaaaaatttattatacaataattaaattcccttttctcaatttacacaaacatcatcacttagaaagcaccattgcttttgtctaatatgtacgattaatctgtatcctcactcaaaaatctactaagtagcgatagctttcaactctgtaaggttcattcattgaattgtaagtttagataaaggctactactccaaacattatttaaaatgaaattaaatacaaaaggagtgagactatgacaatattatcagtgcaacatgtttcaaaaacatacggtaaaaagcacacatttcaagcacttaaagatattaactttgacatacaaaaaggcgaattcgttgcgattatggggccttctggatcaggtaagacaaccttattaaatgtactaagttcaattgaccaaatttctagcggtagcgtgattgctaacggacaagagcttaataaacttaatcaaaaagcacttgccaaattccgtaaagaatcattaggtttcatcttccaagattacagtattctgccgacattaactgtcaaagaaaacattatgttacctttatctgttcaaaaaatgtcgaaagcaacaatggaagaaaattataaagcgattactacagcattaggtatttatgacctaggaaataaataccctagcgaattatctggtggtcaacaacaaagaactgcagcagcgagagcatttgttcacaaaccacaaatcatatttgcagatgagccaacaggcgcactcgactcgaaaagtgcaaatgacctattacaacgtttggaagaaatgaataaatcgtttgatacaactattgtcatggttacacatgatccggttgcagcaagttttgcagaacgtgtcatcatgctaaaagatggccaaattcatacacaactttatcaggaaggacgttctaaacaggccttttatgaagacattgtacatcttcaatcagtattaggtggtgtctcaaatgacatttaaccatatcgttttcaaaaacttacgacaaaacttaaaacattatgcaatgtatttattttcattattttttagcatcgtcttatatttcagttttacaaccttacagtttactaaaggtgtaaataatgacgactcgatggccatcattaagaaaggtgctttagtcggatcaatatttttatttatcattattgtcatctttttaatgtatgccaatcatttattcgtgaaacgccgtacacgtgaatttgcgctatttcagttgattggtttaacacgacaaaacattttgaaaatgttagcacttgaacaaatgattgtatttttaatcacaggtgttgtcggtgtattatgtggcattgcaggtgcacaattattgctttccatagtatctaaattgatgtcgttatcgattaacttatcgatacatttcgaacctatggcccttgttttaactattttcatgctaattattgcgtatgtactgattttatttcaaagtgctttatttctaaaaagacgtagtatcttatcaatgatgaaagattcaattaaaactgatgccacaactgctaaagtaacgactgcagaggttatttcaggcgtattaggtattgctatgattgcactaggctattatatggcgacagaaatgtttggaacatttaaagcactaactatggctatgacatcaccgtttatcattttatttttaacggtagtaggcgcctatttattcttcagaagttccgtgtcactaatttttaaaactttgaaaaaatctaaaaatggacgcgtatctattacagatgttgtatttacatcgtctattatgtaccgaatgaagaaaaatgcgatgtctttaactatcattgcaattatttctgcagttacagtaactgtattgtgtttcgcggcattatctaaatcaaatacagatcaaacccttacatctatggcaccaaatgaatttaacgtggtcgctactcaagatgctaaacaatttgaaactaaactaagccaacaacaaattacattttctaaaaatgcttacgaaactattactgtagataatgttaaagatcaggttattactttggaaaatggtagtgattcaggtcgcacgaattcaatattaagtgcaaataacaaggtaacaggcaacaatgccatcattacaaatacaaaatcacttcctaacattattaatatccatttaaacaaagatttagtagtaaaaggaactaagaatgaaactttccgtgttacacaagaagacaaaggtagggtttatcctttaaatctaagcttcaactcacctgtcgtcgaagtaagtcctgaaaagtatcagcagttgaaaacacaaaataacgttcatactttttatggatatgatattaaacaaacatcacaaaaggaaaaagctcaagcaattgcaaaacagtttggagacaaagtcatcacttatgatgaaatgaaaaaagaggtcgatgctactaacggtattctaatatttgttacatcatttttaggattagcatttttagtagcagctggatgtattatttatattaaacaaatggatgaaactgaggatgaactaagtaacttcagaatattaaaacgcataggctttacgcatacagatatgcttaagggattattattaaaaattactttcaacttcggtttaccattattgattgctatattacatgcagtattcgccgcaatagcatttatgaaattgatgggtaatatttccttcatgccggttattgtagtaattgttgtatacaccctcatttacattacttttgctttaattgcttttgtacattcaaacaaattgattaagaaaaccatttaacacttacgattaaaagatgcttcattgagattttgattttaagcaatgcagtataactattaactgatttataaaaaggagagattgaatcatgaaatttagagaattagtaaaacaatcatacgaggatttgaaaaatttgactgtaacttggtataacgtgattgctttagcaatgattgttattgtcttaagcgtagttacaacaccaattataggtattccagctggtttattaggtggcgcttattatttaaaacgtcgtgaagaaaaaggtaaataagcacattccatcggcatataacattgctatgacctttcaagtcagattttaatatcaacaagtagcatttatcgctgcttgttttttatgaattgcttataaaatcgtcatgtttaaacgttatgtcactttgaaaactagcaaacaccataaaagactacaattttttatttttataaacccctttaaatcaacgtttctaaggtttttaaaaatctttttaaatttattttcaaaaaacactgtacattatgccaatatgagcgtatagttggtcttacgtaataaaagctcgtgaattaaattgtagtgtatttgtttagaatatcctcttttttagttatgaatttgttacaaatattaagtgcaaaagcacatggaggttttctatatgaataacggtacagtaaaatggtttaacgcagaaaaaggttttggtttcatcgaacaagaaaatggcggagacgtattcgtacatttctcaggtatcgctagcgatggctacaaaactttagaagaaggtcaaaaagttactttcgaaatcactgaaggtcaacgtggagaccaagcagttaacgtacaaactgtttaatcttacaaaataaaacgactcattataaatgaatcgctttgattaccaacaaggttctaaatcttgttggtatttttttatgctattttggataatatgagacaatacgatgatgatttataaaaacttatttgccatatacacactaaggaaaattatgaggctgagtataccaattgctgatataatagaaagcgcatttgtcatcgtatttctagctttagtcgtttgtacttcactaggatcttttccattcataaaagcaacaattcgatcgtagttgtccattttatgcactttttttaaatcttctattttcatagatgcataaaaacctattcccaaaatgattgccaccgttataccccaagtccaattccaataaacaactaaaggtcccattaaaattgcagctaatgtcatgaaaataagcatcacatatgtccataagttaagacttcgttgcactttaatatcaggtacaaatggaatagtcccttttactaaatcatctaaagttacattgaacaattcgcacatcattaataagttatgtatgtctggtaagcttttgtcattttcccaattagaaatactctgcctagatacatataacttttcagcaagatattcttgtgaataaccatctcgttccctatactttttaatttgtttactcagattcaattacatacgcctccagtcaattagtacaatcattacaatcagactatcagataaacttagttaaagtcacctttatgattgactaaatgttttgacatacgacaacatcgaggttcgaagactcccttaagacagacctgtataattacgcgcttgtaattttctcaatgccaacttgaatttcacttattaatgatgcaacttttccatgctattcaatgcttgcaaagttagtcctagttaagagattacgttcacactatttactattcgattttccagctttccaactatgcttttctaatcttttttgtgctataaattctaccgcttcaaaaatacatactgcactgatgaaccagcttaggaaaccaacaataatgctaatcaaccacatgtgcgtcatatgtaacatcatccatgtaactaaaatacaaactaatacccctgtcataccaaacactgcgccacgacttacatgcacagcgactttatcaccatattgcatacctgtaataaacatagacactaaaaatactgccggaaacgttgcaaatataccgccaaattctttccaaggtagtgttacagatacaatataacttaataatactgcaaatccccccacaaaaaatttcattaatgttaatttcatgatgttctgcctccaaaaatttattacttaataactgaatacaactaattatcacgcattttccaaactataaatgtctaatactgaatattgcgagggaaataacaaaccaacaaacaactgtgaatattgcgcctttccgataacctttatgcttaatatagagagatgtcaaaaatacagttaatatacaagacagaataccgacaattgctccagtactaagattcatcgacatctccactaattgcgtaccacgatgatctaaagctaatgcgataatagccgcaagaaagactgccggcatagtagctataatacctcctaacttaccacctaccttatcagcaataattgaagctaatgcaacagcgataccaccaatgacaaaatgaagaattgcacttccaattgaaaacatcttcaacgtacctttctataattaattcaatacaaaacgtatcattcacacaaagtgtaaaacttaaattttctactgtaaaggcaactcaagcgatgttcataaagctttcatgatactttcataaactagcaataaagggttcaaatgaaggtatatccagctcaaattagggagtgggacagaaatgatattttcgcaaaatttatttcgtcgtcccaccccagcaaggttgactagaattgaaaaaagcttgttacaagcgcattttcgttcagtcaactactgccaatataacttcgtagagcatagaacattgatttatgtaccagcctgatcaacatataaatataaatttttatgtttcacgtaaaacaaaaaaagacaaagctgttatgatcttagctttgtcttttatgtgttagtcatcatgtatacgacatcctactactaacgtttatatattcgaatttttatttcataataatcttcatgatctttgtctttatgctcaacatgtagtcctgtttgttgaatcgcttggatacttttgcctacctcatctcgtgcttgagtgacatcttgtgcaaagcgaaggttttgtgctttgactttttcgggccccgttttttggcgtactctatcttcagtctgtttcacatttagtttttgtgcaatgacttgctcaatcaacgcttcttgttcactatcagacaatgataataccgctctcgcatggcgttcagtaattttaccttctcttaagcgaagtagtactttcggcgccaacttcaataaacgcaacttatttgcaataaagctttgacttttacctaaactttttgccaattcactttgcgttgtatcaccaatttccaataatttcttataggcttccgcttcttcaacaacagacaaattttctctttgaatattctcaattaatgcaacaacagccgtctcttcatcatccatatcacgaataataacgtctgcttgaggtaaatttagtgattgtattgctctaaatcggcgctctccagcaataatttcaaacatatcttcttcaatcggtcttacaacaataggttgtagtaaaccatgttcatgtattgattcagcaagttctttaattttatttggttcaaacacctgtcttggttgataacggttgggaacgatacgttcaatttgaatggattcaacattactattgcgatcttcttcaatatgtccaatgatgtcatctttgtttttcaaaccaaataattttgaaaaaggttttttcattatccattcgctccttttatgttagttgtaaaggattatgcattatttttcaagtaaaggagtcttattaggcgtccctggttttcttgggtactttttcggcgtctgtctttttttatcaataatgaacatctggcgctctccagcatcttctggcaatttaaaggtatgtgtttctgtaacgttaccacctaacacactaattgcaaattttgcttcttctaattcttcttcaccttttgaagattttaatgcaacaaactgtccaccttttttaattagcggtaaacacaattcactcaacacggataatctagctactgctcttgcagtaacaacatcataagactccctgtagacacccttaccaaatgtttctgctctatcgtgtataaagctgacatcctgtaattgtaattctgacgctaaatggtttaaaaattgaatacgcttatttaatgaatcaacaatcgtcacttttaactgcggaaacattatttttaacggaatacttggaaaaccagctccagcgcctacatcacatatacttataggctgattaaaatcaaaataaaaactaggtgcaatggaatcataaaaatgtttcaaatatacatcgtgttcatctgtaatacttgtcaaattcatcttttcattccattcaacaagtaaacgataatatgtttgaaactgttgtttttgagtctcagttaattcaatattatgttcttttaattgttctgctaaccattctacagtcattagtcactcaccctttggagtttaccttgttctaagtaaatcaataatatagatatgtctgctggatttacccctgatattctagaagcttgtgcaatatttaaaggttttacttctgataatttttctcgcgcttcagtcgccaaactatcaatcttactataatctaagtcttctggaattttcttctcttccatacgcttaactttctcaacttgttgtagtgatttattgatataaccttcatattttgtttgtatttctacttgttcttcaacatctgcattcaattgatgttcttcttctaaaatttctaaaattatatcgtaagtcatttcaggtctgcgtaataaatcgatagctaaaataccatcttttaagcgagaaccaccatgttgttcgataatcgcttgcgtatgttcgtttggtttaatacgaatatctgataaacgcttaatttccgcatcaatttgctgacgtttttcattaaaacgtgcatatcgttcttcagaaatcataccaagttcatatcccatatccgtcaatctcaaatcagcattatcatgacgtagtaacaaacgatattctgcacgtgatgttagtaaacgataaggttcattagtacctttagttacaagatcatcgattaagacaccaatatatgcatctgaacgacttaatatcttttcgcctgtgtttaacactttacctgcagcgttaatacctgccatcaatccttgtcctgctgcttcttcataaccagatgtaccattaatttgacctgcagtatataagtttttaatcattttcgtttcaagtgtaggccataactgcgttggcacaatcgcatcatattcaattgcgtagccggcacgcatcatatctgctttttcaagacctggtatcgtctctaacatttgacgttgcacatgttcaggaagacttgtagacaatccttgcacatatacttcatttgtattacgaccttcaggctctaagaaaagttgatgtcgcggcttatcattaaatcgaacaaatttatcttcaattgaagggcaataacgtggcccggttcctttaatcatccctgaatacattgcagatagatgtaaattatcatcgataactttgtgtgtttcagcattagtatacgttagccaacatggcaattgatctaatatatattctgttgtttcaaagctgaatgcacgacctacatcgtcacctggttgtatttcagtcttcgaatagtcaattgtttttgaatttacacgcggtggtgtacctgttttaaaacgaacaatatcaaaaccaagttctcttaaattgtctgataatgtgattgatggtaattggtgatttggtccacttgaatacttcatattacctaaaatgatttcaccacgtaaaaatgttcccgttgtaataattactgctttagataaatactctgtaccaatatttgtacgtacacctttaacttcattatcttctataataagttcgtctaccataccttgcattatatgcaaattttcttcatcttcaatcacgcgtttcatttcttgttgataaagtactttatctgcttgcgctcttagtgctcttacagcaggtcctttacctgtatttaacattctcatttgaatgtgtgttttatcgattgtttttgccatttgtccacctaaagcatcaatttcacgaacaacgatgcctttagctggtccacctacagatgggttacatggcataaatgcaatattatctaaatttattgttagcattaatgttttagcaccacgtcttgcagatgctaaacctgcttctacacctgcatgtcccgcacctataacgattacatcatattcttgaaccacaatataaacctccttatttgatatcttactagccttcttaagacgatattccgtctatttcaattactatttacctaagcagaattgactgaataactgatcgatgagttcatcacttgcagtctcaccaataatttctcctaatatttcccaagttctagttaaatcaatttgtaccatatccataggcacaccagattctgctgcatcaatcgcatcttgtatcgtttgtcttgcttgttttaataatgaaatatgtcttgaattagaaacataagtcatatcttgattttgtacttctccaccaaagaacaaatctcgaatttgtatttctaattcatcaataccttcttgttttaacattgaagtttgaattaatggcgtatcacctatcatatctttaacttcattaatatctatgttttgctctaaatccattttattaacaattacgattacatcttcatttttaaccacttcatataatgtgtaatcttcttgagtcaatgcttcgttattgtttaatacaaataaaattaagtctgcttggctaagagcctttctagagcgttcaacaccaatcttctctactatatcttctgtctcgcgtataccagcagtgtcaactaatcttaatggcacgccacgaacattgacgtactcttctaagacatctcttgtagtacctgctacctcagttacaatcgctttattatcttgtattaaattatttaacatcgatgatttacctacgtttggtttaccaacaataactgtagataaaccttcacgcataattttgccctgcgcaccggtatctaataaacgattaatttcctgtttgatttctttagactgctctaaaagaaattcagtagtcgcatcttcaacatcatcgtattcaggataatcaatattcacttccacttgagcgagtatctctaatatagattgacgttgttttttgattaagtcacttagacgaccttcaatttgattcatcgcaactttagaagctctatctgtcttcgagcgaataaagtccataactgcttcagcttgagataaatcaatacgaccatttaaaaaggcacgttttgtaaattcacctggctcagccattctagcgccatatgtcatagtaagttccagcactctattaatcgttaaaataccaccatgacaattaatttctataatatcttcgcgtgtaaatgtttttggcgctcttaacacagacaccataacttcttcaaccacttctttagactctggatcaataatatgaccgtaattaatcgtatgtgatggaacatcatttaaaagatgttttcctttatataatttgtcagcaatttcaacggcttgcggtccagacaatcgaacaattccaattgccccttcacccattggtgttgaaatactcgtaattgtatctaaatccatattgctactcgcctccttcaacgatgtgaatacattttaaagtaagttattataaccctaaggtcagtcttaaccctaaggtcagtcttacgtttgtctgaggtaagacttcgggatgcgttgagtggttaatgttttccttcccctaccctatccttacttaatctttttattaaaaactttggcaattttaagtacgtgctcaagactattctgtatttgtaaagtcgtcatatctttagctggctgtcttgctattacaataatatctttggccaatatatgcgacttatgtactttgaaattttcacgtattgctcttttaatcttgtttcttaacactgcattacctagttttttagaaacactaatacctaagcgaaaatggtctatttctttattattacaagtgtatacaacaaattgtctgttggctacagaatgaccttttttatatattctctgaaaatctgcattctttttaattcggtaagctttttccaataacatcactcgcttatttatcgtttttatttgaagctatatttaaacttctattgagcttataacataaatttctatttattcttaatttaaacgaaaaaaaagatcactgatgagtcagtgatcttatgcagataaaactttacggcctttacgacgacggcgcgctaaaactttacggccattttttgtgctcatgcgttttctgaaaccatgaactttactatgtttacgtttatttggttgataagtacgttttaccatgcaaaacacctccatctttatacagttatctaatataccagattatgcagactctgatcactttaatagataagattttgcgtttcttagattaaaattctcgtattagctcattgattatctagtcataattcaagcaactactacaatataacaaaatcctttttataacgcaagttcattttatactactgctcaatttttttacttttat

(The sequence listing continues in the following parts.)
